(19) United States
(12) Patent Application Publication
(10) Pub. No.: US 2024/0261421 A1
(43) Pub. Date: Aug. 8, 2024

(54) METHOD OF TREATING OR AMELIORATING METABOLIC DISORDERS USING ANTAGONISTIC BINDING PROTEINS FOR GASTRIC INHIBITORY PEPTIDE RECEPTOR (GIPR)/GLP-1 RECEPTOR AGONIST FUSION PROTEINS

(71) Applicant: AMGEN INC., THOUSAND OAKS, CA (US)

(72) Inventors: KENNETH W. WALKER, NEWBURY PARK, CA (US); JERRY RYAN HOLDER, SIMI VALLEY, CA (US); DAVID J. LLOYD, THOUSAND OAKS, CA (US); SHU-CHEN LU, THOUSAND OAKS, CA (US); MURIELLE M. VENIANT-ELLISON, THOUSAND OAKS, CA (US); SHANAKA STANISLAUS, THOUSAND OAKS, CA (US)

(73) Assignee: AMGEN INC., THOUSAND OAKS, CA (US)

(21) Appl. No.: 18/614,508

(22) Filed: Mar. 22, 2024

Related U.S. Application Data
(63) Continuation of application No. 16/623,756, filed on Dec. 17, 2019.
(60) Provisional application No. 62/523,216, filed on Jun. 21, 2017.

(51) Int. Cl. A61K 47/65; C07K 14/72; C07K 16/26

(52) U.S. Cl. CPC A61K 47/65; C07K 14/72; C07K 16/26; C07K 2317/21; C07K 2317/31; C07K 2317/565; C07K 2317/94; C07K 2319/30

(57) ABSTRACT

Methods of treating metabolic diseases and disorders using a composition comprising a GLP-1/GIPR antigen binding protein fusion protein are provided. In various embodiments the metabolic disease or disorder is type 2 diabetes, obesity, dyslipidemia, elevated glucose levels, elevated insulin levels and diabetic nephropathy. In certain embodiments the composition comprises the C-terminus of a GLP-1 analog fused to the N-terminus of the light chain variable or heavy chain variable region of an antibody or functional fragment thereof that binds GIPR, optionally with a linker in between.

### CROSS REFERENCE TO RELATED APPLICATIONS

[0001] This application is a continuation application of U.S. patent application Ser. No. 16/623,756, which is a national stage application under 35 U.S.C. § 371 of International Application No. PCT/US2018/038634, having an international filing date of 20 Jun. 2018, which claims the benefit of U.S. Provisional Patent Application No. 62/523,216, filed 21 Jun. 2017, each of which is incorporated herein by reference in its entirety.

### SEQUENCE LISTING

[0002] Incorporated by reference in its entirety herein is a nucleotide/amino acid sequence listing submitted concurrently herewith and identified as follows: One 5840 kilobyte XML document named “A-2165-US03-CNT_Final_Sequence_List_ST26_011924” created on Jan. 9, 2024.

### FIELD OF THE INVENTION

[0003] The present disclosure relates to the treatment or amelioration of a metabolic disorder, such as type 2 diabetes, elevated glucose levels, elevated insulin levels, obesity, non-alcoholic fatty liver disease, cardiovascular diseases or diabetic nephropathy, using GLP-1 receptor agonists fused via a peptide linker to an antigen binding protein specific for the gastric inhibitory peptide receptor (GIPR).

### BACKGROUND OF THE INVENTION

[0004] Glucose-dependent insulinotropic polypeptide (GIP) is a single 42-amino acid peptide secreted from K-cells in the small intestine (duodenum and jejunum). Human GIP is derived from the processing of proGIP, a 153-amino acid precursor that is encoded by a gene localized to chromosome 17q (Inagaki et al., Mol Endocrinol 1989; 3:1014-1021; Fehmann et al. Endocr Rev. 1995; 16:390-410). GIP was formerly called gastric inhibitory polypeptide.

[0005] GIP secretion is induced by food ingestion. GIP has a number of physiological effects in tissues, including promotion of fat storage in adipocytes and promotion of pancreatic islet β-cell function and glucose-dependent insulin secretion. GIP and glucagon like polypeptide-1 (GLP-1) are known insulinotropic factors (“incretins”). Intact GIP is rapidly degraded by DPPIV to an inactive form. The insulinotropic effect of GIP is lost in type 2 diabetic patients while GLP-1's incretin effect remains intact (Nauck et al. J. Clinc. Invest. 1993; 91:301-307).

[0006] The GIP receptor (GIPR) is a member of the secretin-glucagon family of G-protein coupled receptors (GPCRs) having an extracellular N-terminus, seven transmembrane domains and an intracellular C-terminus. The N-terminal extracellular domains of this family of receptors are usually glycosylated and form the recognition and binding domain of the receptor. GIPR is highly expressed in a number of tissues, including the pancreas, gut, adipose tissue, heart, pituitary, adrenal cortex, and brain (Usdin et al., Endocrinology. 1993, 133:2861-2870). Human GIPR comprises 466 amino acids and is encoded by a gene located on chromosome 19q13.3 (Gremlich et al., Diabetes. 1995; 44:1202-8; Volz et al., FEBS Lett. 1995, 373:23-29). Studies have suggested that alternative mRNA splicing results in the production of GIP receptor variants of differing lengths in human, rat and mouse.

[0007] GIPR knockout mice (Gipr^{-/-}) are resistant to high fat diet-induced weight gain and have improved insulin sensitivity and lipid profiles. (Yamada et al., Diabetes. 2006, 55:S86; Miyawaki et al. Nature Med. 2002, 8:738-742). In addition, a novel small molecule GIPR antagonist SKL-14959 prevents obesity and insulin resistance. (Diabetologia 2008, 51:S373, 44th EASD Annual meeting poster).

[0008] Collectively, these links to obesity and insulin resistance imply GIPR inhibition is a useful approach for therapeutic intervention.

[0009] Glucagon-like peptide-1 is a 31-amino acid peptide derived from the proglucagon gene. It is secreted by intestinal L-cells and released in response to food ingestion to induce insulin secretion from pancreatic 3-cells (Diabetes 2004, 53:S3, 205-214). In addition to the incretin effects, GLP-1 also decreases glucagon secretion, delays gastric emptying and reduces caloric intake (Diabetes Care, 2003, 26(10): 2929-2940). GLP-1 exerts its effects by activation of the GLP-1 receptor, which belongs to a class B G-protein-coupled receptor (Endocrinology. 1993, 133(4):1907-10). The function of GLP-1 is limited by rapid degradation by the DPP-IV enzyme, resulting in a half-life of approximately 2 minutes. Recently, long-lasting GLP-1 receptor agonists (GLP-1 RAs) such as exenatide, liraglutide, dulaglutide have been developed and are now being used clinically to improve glycemic control in patients with type 2 diabetes. Furthermore, GLP-1RAs also promote body weight reduction as well as reduction in blood pressure and plasma cholesterol levels in patients (Bioorg. Med. Chem. Lett 2013, 23:4011-4018).

### SUMMARY OF THE INVENTION

[0010] In one aspect, the present disclosure provides a method of treating a subject with a metabolic disorder, the method comprising administering to the subject a therapeutically effective amount of a composition comprising a) an antibody or functional fragment thereof that specifically binds to human GIPR, wherein the antibody or functional fragment thereof comprises a light chain variable region and a heavy chain variable region; and b) a GLP-1 receptor agonist, wherein the C-terminus of the GLP-1 receptor agonist is fused to N-terminus of either the light chain variable region or the heavy chain variable region. In one embodiment, the GLP-1 receptor agonist can be fused via a peptide linker.

[0011] In one embodiment, the metabolic disorder is a disorder of glucose metabolism. In another embodiment, the glucose metabolism disorder comprises hyperglycemia and administering the antigen binding protein reduces plasma glucose. In another embodiment, the glucose metabolism disorder comprises hyperinsulinemia and administering the antigen binding protein reduces plasma insulin. In another embodiment, the glucose metabolism disorder comprises glucose intolerance and administering the antigen binding protein reduces increases glucose tolerance. In another embodiment, the glucose metabolism disorder comprises insulin resistance and administering the antigen binding protein reduces insulin resistance. In another embodiment, the glucose metabolism disorder comprises diabetes mellitus. In another embodiment, the subject is obese. In another embodiment, administering the composition reduces body weight in an obese subject. In another embodiment, administering the composition reduces body weight gain in an obese subject. In another embodiment, administering the composition reduces fat mass in an obese subject. In another embodiment, the glucose metabolism disorder comprises insulin resistance and administering the composition reduces insulin resistance in an obese subject. In another embodiment, administering the composition reduces liver steatosis in an obese subject having increased liver steatosis. In another embodiment, administering the composition reduces liver fat content in an obese subject having increased liver fat content.

[0012] In one aspect, the composition comprises an antibody or functional fragment thereof that specifically binds to a protein having an amino acid sequence having at least 90% amino acid sequence identity to an amino acid sequence of a human GIPR.

[0013] In one embodiment, the human GIPR has a sequence comprising a sequence selected from the group consisting of SEQ ID NO: 3141, SEQ ID NO: 3143, and SEQ ID NO: 3145. In one embodiment, the antibody or functional fragment thereof is a monoclonal antibody, a recombinant antibody, a human antibody, a humanized antibody, a chimeric antibody, a multispecific antibody, or an antibody fragment thereof. In one embodiment, the antibody fragment is a Fab fragment, a Fab′ fragment, or a F(ab′)2 fragment. In one embodiment, the antibody or functional fragment thereof is of the IgG1-, IgG2- IgG3- or IgG4-type. In one embodiment, the antibody or functional fragment thereof inhibits binding of GIP to the extracellular portion of human GIPR.

[0014] In one embodiment, the GLP-1 receptor agonist is GLP-1(7-37) or a GLP-1(7-37) analog. In one embodiment, the GLP-1 receptor agonist is selected from the group consisting of GLP-1(7-37) (SEQ ID NO: 3182);
[0015] Exendin-4 (SEQ ID NO: 3163);
[0016] Exendin-3 (SEQ ID NO: 3164);
[0017] Leu¹⁴-exendin-4 (SEQ ID NO: 3165);
[0018] Leu¹⁴,Phe²⁵-exendin-4 (SEQ ID NO: 3166);
[0019] Leu¹⁴,Ala¹⁹,Phe²⁵-exendin-4 (SEQ ID NO: 3167);
[0020] exendin-4(1-30) (SEQ ID NO: 3168);
[0021] Leu¹⁴-exendin-4(1-30) (SEQ ID NO: 3169);
[0022] Leu¹⁴,Phe²⁵-exendin-4(1-30) (SEQ ID NO: 3170);
[0023] Leu¹⁴,Ala¹⁹,Phe²⁵-exendin-4(1-30) (SEQ ID NO: 3171);
[0024] exendin-4(1-28) (SEQ ID NO: 3172);
[0025] Leu¹⁴-exendin-4(1-28) (SEQ ID NO: 3173);
[0026] Leu¹⁴,Phe²⁵-exendin-4(1-28) (SEQ ID NO: 3174);
[0027] Leu¹⁴,Ala¹⁹,Phe²⁵-exendin-4 (1-28) (SEQ ID NO: 3175);
[0028] Leu¹⁴,Lys^{17,20},Ala¹⁹,Glu²¹,Phe²⁵, Gln²⁸-exendin-4 (SEQ ID NO: 3176);
[0029] Leu¹⁴,Lys^{17,20},Ala¹⁹,Glu²¹,Gln²⁸-exendin-4 (SEQ ID NO: 3177);
[0030] Phe⁴,Leu¹⁴,Gln²⁸,Lys³³,Glu³⁴, Ile^{35,36}Ser³⁷-exendin-4(1-37) (SEQ ID NO: 3178);
[0031] Phe⁴,Leu¹⁴,Lys^{17,20},Ala¹⁹,Glu²¹,Gln²⁸-exendin-4 (SEQ ID NO: 3179);
[0032] Val¹¹,Ile¹³,Leu¹⁴,Ala¹⁶,Lys²¹,Phe²⁵-exendin-4 (SEQ ID NO: 3180);
[0033] exendin-4-Lys⁴⁰ (SEQ ID NO: 3181);
[0034] GLP-1(7-37) (SEQ ID NO: 3182);
[0035] HXaa₈EGTFTSDVSSYLEXaa₂₂Xaa₂₃AAKEFIXaa₃₀WLXaa₃₃Xaa₃₄G Xaa₃₆Xaa₃₇; wherein Xaa₈ is A, V, or G; Xaa₂₂ is G, K, or E; Xaa₂₃ is Q or K; Xaa₃₀ is A or E; Xaa₃₃ is V or K; Xaa₃₄ is K, N, or R; Xaa₃₆ is R or G; and Xaa₃₇ is G, H, P, or absent (SEQ ID NO: 3183);

(SEQ ID NO: 3184)
Arg³⁴-GLP-1(7-37);
(SEQ ID NO: 3185)
Glu³⁰-GLP-1(7-37);
(SEQ ID NO: 3196)
Lys²²-GLP-1(7-37);
(SEQ ID NO: 3187)
Gly^{8,36}, Glu²²-GLP-1(7-37);
(SEQ ID NO: 3188)
Val⁸, Glu²², Gly³⁶-GLP-1(7-37);
(SEQ ID NO: 3189)
Gly^{8,36}, Glu²², Lys³³, Asn³⁴-GLP-1(7-37);
(SEQ ID NO: 3190)
Val⁸, Glu²², Lys³³, Asn³⁴, Gly³⁶-GLP-1(7-37);
(SEQ ID NO: 3191)
Gly^{3,36}, Glu²², Pro³⁷-GLP-1(7-37);
(SEQ ID NO: 3192)
Val⁸, Glu²², Gly³⁶, Pro³⁷-GLP-1(7-37);
(SEQ ID NO: 3193)
Gly^{8,36}, Glu²², Lys³³, Asn³⁴, Pro³⁷-GLP-1(7-37);
(SEQ ID NO: 3194)
Val⁸, Glu²², Lys³³, Asn³⁴, Gly³⁶, Pro³⁷-GLP-1(7-37);
(SEQ ID NO: 3195)
Gly^{8,36}, Glu²²-GLP-1(7-36);
(SEQ ID NO: 3196)
Val⁸, Glu²², Gly³⁶-GLP-1(7-36);
(SEQ ID NO: 3197)
Val⁸, Glu²², Asn³⁴, Gly³⁶-GLP-1(7-36);
(SEQ ID NO: 3198)
Gly^{8,36}, Glu²², Asn34-GLP-1(7-36);
(SEQ ID NO: 3199)
GLP-1 analog;
(SEQ ID NO: 3200)
GLP-1 analog;
(SEQ ID NO: 3201)
[Gly^{8,36}, Glu²²]GLP-1(7-37);
(SEQ ID NO: 3202)
HAEGTFTSDVSSYLEGQAAKEFIAWLVKGRG;
(SEQ ID NO: 3203)
AEGTFTSDVSSYLEGQAAKEFIAWLVKGRG;
(SEQ ID NO: 3204)
EGTFTSDVSSYLEGQAAKEFIAWLVKGRG;
(SEQ ID NO: 3205)
HGEGTFTSDVSSYLEGQAAKEFIAWLVKGRG;
(SEQ ID NO: 3206)
HGEGTFTSDVSSYLEGQAAKEFIAWLVKGR;
(SEQ ID NO: 3207)
HLEGTFTSDVSSYLEGQAAKEFIAWLVKGRG;
(SEQ ID NO: 3208)
HGEGTFTSDLSKQMEEEAVRLF;
(SEQ ID NO: 3209)
HGEGTFTSDLSKQMEEEAVRLFI;
(SEQ ID NO: 3210)
HGEGTFTSDVSSYLEGQAAKEFIAWLVKGGG;
(SEQ ID NO: 3211)
HGEGTFTSDLSKQMEEEAVRLAAQAAQQGGG;
(SEQ ID NO: 3212)
HSEGTFTSDVSSYLEEQAAKEFIAWLVKGGG;
(SEQ ID NO: 3213)
HSQGTFTSDVSSYLEEQAAKEFIAWLVKGGG;
(SEQ ID NO: 3214)
HGDGTFTSDVSSYLEEQAAKEFIAWLVKGGG;
(SEQ ID NO: 3215)
HSDGTFTSDVSSYLEEQAAKEFIAWLVKGGG;
(SEQ ID NO: 3216)
HSEGTFTSDVSSYLEEQAAKEFIEWLVKGGG;
(SEQ ID NO: 3217)
HSQGTFTSDVSSYLEEQAAKEFIEWLVKGGG;
(SEQ ID NO: 3218)
HGDGTFTSDVSSYLEEQAAKEFIEWLVKGGG;
(SEQ ID NO: 3219)
HSDGTFTSDVSSYLEEQAAKEFIEWLVKGGG;
(SEQ ID NO: 3220)
HGEGTFTSDVSSYLEEQAAKEFIAWLKNGGG;
(SEQ ID NO: 3221)
HSEGTFTSDVSSYLEEQAAKEFIAWLKNGGG;
(SEQ ID NO: 3222)
HSQGTFTSDVSSYLEEQAAKEFIAWLKNGGG;
(SEQ ID NO: 3223)
HGDGTFTSDVSSYLEEQAAKEFIAWLKNGGG;
(SEQ ID NO: 3224)
HSDGTFTSDVSSYLEEQAAKEFIAWLKNGGG;
(SEQ ID NO: 3225)
HSEGTFTSDVSSYLEEQAAKEFIEWLKNGGG;
(SEQ ID NO: 3226)
HSQGTFTSDVSSYLEEQAAKEFIEWLKNGGG;
(SEQ ID NO: 3227)
HGDGTFTSDVSSYLEEQAAKEFIEWLKNGGG;
(SEQ ID NO: 3228)
HSDGTFTSDVSSYLEEQAAKEFIEWLKNGGG;
(SEQ ID NO: 3229)
HGEGTFTSDVSSYLEEQAAKEFIEWLKNEGG;
(SEQ ID NO: 3230)
HSEGTFTSDVSSYLEEQAAKEFIEWLKNEGG;
(SEQ ID NO: 3231)
HGEGTFTSDVSSYLEEQAAKEFIEWLKNPGG;
(SEQ ID NO: 3232)
HSEGTFTSDVSSYLEEQAAKEFIEWLKNPGG;
(SEQ ID NO: 3233)
HGEGTFTSDVSSYLEEQAAKEFIEWLKNQGG;
(SEQ ID NO: 3234)
HSEGTFTSDVSSYLEEQAAKEFIEWLKNQGG;
(SEQ ID NO: 3235)
HGEGTFTSDVSSYLEEQAAKEFIEWLKNTGG;
(SEQ ID NO: 3236)
HSEGTFTSDVSSYLEEQAAKEFIEWLKNTGG;
(SEQ ID NO: 3237)
HGEGTFTSDVSSYLEEQAAKEFIEWLKNVGG;
(SEQ ID NO: 3238)
HSEGTFTSDVSSYLEEQAAKEFIEWLKNVGG;
(SEQ ID NO: 3239)
HGEGTFTSDVSSYLEEQAAKEFIEWLKQGGG;
(SEQ ID NO: 3240)
HSEGTFTSDVSSYLEEQAAKEFIEWLKQGGG;
(SEQ ID NO: 3241)
HGEGTFTSDVSSYLEEQAAKEFIAWLVKGGG;
(SEQ ID NO: 3242)
HGEGTFTSDVSXYLEEQAAKEFIAWLVKGGG;
(SEQ ID NO: 3243)
HVEGTFTSDVSSYLEGQAAKEFIAWLVKGGG;
(SEQ ID NO: 3244)
HSEGTFTSDVSSYLEGQAAKEFIAWLVKGGG;
(SEQ ID NO: 3245)
HGQGTFTSDVSSYLEGQAAKEFIAWLVKGGG;
(SEQ ID NO: 3246)
HVQGTFTSDVSSYLEGQAAKEFIAWLVKGGG;
(SEQ ID NO: 3247)
HSQGTFTSDVSSYLEGQAAKEFIAWLVKGGG;
(SEQ ID NO: 3248)
HVDGTFTSDVSSYLEGQAAKEFIAWLVKGGG;
(SEQ ID NO: 3249)
HGHGTFTSDVSSYLEGQAAKEFIAWLVKGGG;
(SEQ ID NO: 3250)
HVHGTFTSDVSSYLEGQAAKEFIAWLVKGGG;
(SEQ ID NO: 3251)
HSHGTFTSDVSSYLEGQAAKEFIAWLVKGGG;
(SEQ ID NO: 3252)
HGDGTFTSDVSSYLEGQAAKEFIAWLVKGGG;
(SEQ ID NO: 3253)
HSDGTFTSDVSSYLEGQAAKEFIAWLVKGGG;
(SEQ ID NO: 3254)
HGEGTFTSDVSSYLEEQAAKEFIEWLKNGGG;
(SEQ ID NO: 3255)
HGEGTFTSDVSSYLEEQAAKEFIEWLVKGGG;
(SEQ ID NO: 3256)
HGEGTFTSDYSSYLEEQAAKEFIEWLKNGGG;
(SEQ ID NO: 3257)
HGEGTFTSEVSSYLEGQAAKEFIEWLKNGGG;
(SEQ ID NO: 3258)
HSEGTFTSDLSKQMEEEAVRLFAAQAAQQGGG;
(SEQ ID NO: 3259)
HSQGTFTSDLSKQMEEEAVRLFAAQAAQQGGG;
(SEQ ID NO: 3260)
HGDGTFTSDLSKQMEEEAVRLFAAQAAQQGGG;
(SEQ ID NO: 3261)
HSDGTFTSDLSKQMEEEAVRLFAAQAAQQGGG;
(SEQ ID NO: 3262)
HGEGTFTSDLSKQMEEEAVRLFAAQAAQQGGG;
(SEQ ID NO: 3263)
HGEGTFTSDLSKQMEEEAVRLFIEWLKNGG;
(SEQ ID NO: 3264)
HGEGTFTSDVSSYLEGEAVRLFIEWLKNGG;
(SEQ ID NO: 3265)
HGEGTFTSDLSKQMEEEAVRLFIEWLKNGGPSSGAPPPS;
(SEQ ID NO: 3266)
HGEGTFTSDVSSYLEGEAVRLFIEWLKNGGPSSGAPPPS;
(SEQ ID NO: 3267)
HHGEGTFTSDVSSYLEEQAAKEFIEWLKNGGG;
(SEQ ID NO: 3268)
HHGEGTFTSDVSSYLEEQAAKEFIEWLKDGGG;
(SEQ ID NO: 3269)
HHGEGTFTSDVSSYLEEQAAKEFIEWLKQGGG;
(SEQ ID NO: 3270)
HHGEGTFTSDVSSYLEEQAAKEFIEWLKNQGG;
(SEQ ID NO: 3271)
HHGEGTFTSDVSSYLEEQAAKEFIEWLKNTGG;
(SEQ ID NO: 3272)
HHGEGTFTSDVSSYLEEQAAKEFIEWLKNVGG;
(SEQ ID NO: 3273)
HHGEGTFTSDVSSYLEEQAAKEFIEWLKNPGG;
(SEQ ID NO: 3274)
HHGEGTFTSDVSSYLEEQAAKEFIEWLKNEGG;
(SEQ ID NO: 3275)
HGAGTFTSDVSSYLEGQAAKEFIAWLVKG;
(SEQ ID NO: 3276)
HGDGTFTSDVSSYLEGQAAKEFIAWLVKG;
(SEQ ID NO: 3277)
HGLGTFTSDVSSYLEGQAAKEFIAWLVKG;
(SEQ ID NO: 3278)
HGVGTFTSDVSSYLEGQAAKEFIAWLVKG;
(SEQ ID NO: 3279)
HGFGTFTSDVSSYLEGQAAKEFIAWLVKG;
(SEQ ID NO: 3280)
HGYGTFTSDVSSYLEGQAAKEFIAWLVKG;
(SEQ ID NO: 3281)
HGTGTFTSDVSSYLEGQAAKEFIAWLVKG;
(SEQ ID NO: 3282)
HGNGTFTSDVSSYLEGQAAKEFIAWLVKG;
(SEQ ID NO: 3283)
HGHGTFTSDVSSYLEGQAAKEFIAWLVKG;
(SEQ ID NO: 3284)
HGKGTFTSDVSSYLEGQAAKEFIAWLVKG;
(SEQ ID NO: 3285)
HGIGTFTSDVSSYLEGQAAKEFIAWLVKG;
(SEQ ID NO: 3286)
HGWGTFTSDVSSYLEGQAAKEFIAWLVKG;
(SEQ ID NO: 3287)
HGPGTFTSDVSSYLEGQAAKEFIAWLVKG;
(SEQ ID NO: 3288)
HGSGTFTSDVSSYLEGQAAKEFIAWLVKG;
(SEQ ID NO: 3289)
HGRGTFTSDVSSYLEGQAAKEFIAWLVKG;
(SEQ ID NO: 3290)
AHGEGTFTSDVSSYLEGQAAKEFIAWLVKG;
(SEQ ID NO: 3291)
GHGEGTFTSDVSSYLEGQAAKEFIAWLVKG;
(SEQ ID NO: 3292)
HHGEGTFTSDVSSYLEGQAAKEFIAWLVKG;
(SEQ ID NO: 3293)
HHEGTFTSDVSSYLEGQAAKEFIAWLVKG;
(SEQ ID NO: 3294)
HGEATFTSDVSSYLEGQAAKEFIAWLVKG;
(SEQ ID NO: 3295)
HGESTFTSDVSSYLEGQAAKEFIAWLVKG;
(SEQ ID NO: 3296)
HGEVTFTSDVSSYLEGQAAKEFIAWLVKG;
(SEQ ID NO: 3297)
HGEKTFTSDVSSYLEGQAAKEFIAWLVKG;
(SEQ ID NO: 3298)
HGEETFTSDVSSYLEGQAAKEFIAWLVKG;
(SEQ ID NO: 3299)
HGEGTFTSDVSSYLEGQAAKEFIAWLVKG;
(SEQ ID NO: 3300)
HVEGTFTSDVSSYLEGQAAKEFIAWLVKGRG;
(SEQ ID NO: 3301)
HSEGTFTSDVSSYLEGQAAKEFIAWLVKGRG;
and
(SEQ ID NO: 3302)
HGQGTFTSDVSSYLEGQAAKEFIAWLVKGRG.

[0036] In one embodiment, the peptide linker comprises a sequence selected from the group consisting of (Gly₃Ser)₂ (SEQ ID NO: 3303), (Gly₄Ser)₂ (SEQ ID NO: 3304), (Gly₃Ser)₃ (SEQ ID NO: 3305), (Gly₄Ser)₃ (SEQ ID NO: 3306), (Gly₃Ser)₄ (SEQ ID NO: 3307), (Gly₄Ser)₄ (SEQ ID NO: 3308), (Gly₃Ser)₅ (SEQ ID NO: 3309), (Gly₄Ser)₅ (SEQ ID NO: 3310), (Gly₃Ser)₆ (SEQ ID NO: 3311), (Gly₄Ser)₆ (SEQ ID NO: 3359), GGEGGG (SEQ ID NO:3312);

(SEQ ID NO: 3313)
GGEEEGGG;
(SEQ ID NO: 3314)
GEEEG;
(SEQ ID NO: 3315)
GEEE;
(SEQ ID NO: 3316)
GGDGGG;
(SEQ ID NO: 3317)
GGDDDGG;
(SEQ ID NO: 3318)
GDDDG;
(SEQ ID NO: 3319)
GDDD;
(SEQ ID NO: 3320)
GGGGSDDSDEGSDGEDGGGGS;
(SEQ ID NO: 3321)
WEWEW;
(SEQ ID NO: 3322)
FEFEF;
(SEQ ID NO: 3323)
EEEWWW;
(SEQ ID NO: 3324)
EEEFFF;
(SEQ ID NO: 3325)
WWEEEWW;
(SEQ ID NO: 3326)
FFEEEFF.
(SEQ ID NO: 3327)
GGGG;
(SEQ ID NO: 3328)
GGGGSGGGG;
(SEQ ID NO: 3329)
GAPAPAPAPG;
(SEQ ID NO: 3330)
GGGGAGGGGAGGGG;
(SEQ ID NO: 3331)
GAPAPAPAPAPAPG;
(SEQ ID NO: 3332)
GAPAPAPAPAPAPAPAPG;
(SEQ ID NO: 3333)
GGGGAGGGGAGGGGAGGGG;
(SEQ ID NO: 3334)
GAPAPAPAPAPAPAPAPAPAPG;
(SEQ ID NO: 3335)
GSGSATGGSGSVASSGSGSATGS;
and
(SEQ ID NO: 3336)
GSGSATGGSGSVASSGSGSATHL.

### BRIEF DESCRIPTION OF THE DRAWINGS

[0037] FIG. 1A-1B: Synthetic Peptides (FIG. 1A discloses SEQ ID NOS 3948 and 3275-3298 and FIG. 1B discloses SEQ ID NOS 3948 and 3299-3302, all respectively, in order of appearance)

[0038] FIG. 2: Results initial GLP-1 SAR screen: Expressible Series (FIG. 2 discloses SEQ ID NOS 3182, 3182, 3203-3206, 3299, 3207 and 3300-3302, respectively, in order of appearance)

[0039] FIG. 3: Recombinant N-terminal Analogues

[0040] FIG. 4: GLP1 N-terminal Variants Summary HC of 6H1 Ab with 1Kmod Linker

[0041] FIG. 5A-5C: In vivo pharmacodynamic evaluation of GLP1 variants and linkers in mice

[0042] FIG. 6A-6C: In vivo pharmacodynamic evaluation of GLP1 variants in mice

[0043] FIG. 7A-7E: PK N-terminal Variants

[0044] FIG. 8: Recombinant Linker Analogues (FIG. 8 discloses SEQ ID NOS 3327-3328, 3330, 3333, 3329, 3331-3332 and 3334, respectively, in order of appearance)

[0045] FIG. 9: GLP1 Linker Variants Summary HC of 6H1 Ab GLP1(A2G/R30G) (FIG. 9 discloses SEQ ID NOS 3327-3328, 3330, 3333, 3331-3332, 3334, 3336 and 3333-3334, respectively, in order of appearance)

[0046] FIG. 10A-10E: GLP1 Linker Variants Fused to HC of 6H1 Ab in Mice

[0047] FIG. 11A-11C: In vivo pharmacodynamic evaluation of linker variants in mice

[0048] FIG. 12A-12E: PK Linker Variants

[0049] FIG. 13: Recombinant N-term & C-term GLP1 Analogues and Linkers (FIG. 13 discloses SEQ ID NOS 3364 and 3333-3334, respectively, in order of appearance)

[0050] FIG. 14: 1K Linker Variants

[0051] FIG. 15: (G4A)3G4 Linker Variants (SEQ ID NO: 3333)

[0052] FIG. 16: G(AP)10G Linker Variants (SEQ ID NO: 3334)

[0053] FIG. 17: GLP1 N-terminal Variants Summary Fused to HC of 6H1 Ab (FIG. 17 discloses SEQ ID NOS 3364, 3336 and 3333-3334, respectively in order of appearance)

[0054] FIG. 18: Signal Sequence Processing May Be Responsible for Observed HG/E Cleavage

[0055] FIG. 19: GLP1 C-terminal Variants Summary Fused to HC of 6H1 Ab (FIG. 19 discloses SEQ ID NOS 3364, 3336 and 3333-3334, respectively, in order of appearance)

[0056] FIG. 20A-20D: 1Kmod Linker

[0057] FIG. 21A-21D: (G4A)3G4 Linker (SEQ ID NO: 3333)

[0058] FIG. 22A-22D: G(AP)10G Linker (SEQ ID NO: 3334)

[0059] FIG. 23: GLP1 Linkers Summary Fused to HC of 6H1 Ab (FIG. 23 discloses SEQ ID NOS 3333-3334 and 3364, respectively, in order of appearance)

[0060] FIG. 24A-24D: linker comparison with A24E/V27K/K28N (FIG. 24B discloses SEQ ID NOS 3333-3334 and FIG. 24D discloses SEQ ID NOS 3333-3334, all respectively, in order of appearance)

[0061] FIG. 25: Recombinant C-term GLP1 Analogues and Linkers (FIG. 25 discloses SEQ ID NOS 3333-3334, respectively, in order of appearance)

[0062] FIG. 26: Mouse PK study (FIG. 26 discloses SEQ ID NO: 3365)

[0063] FIG. 27A-27D: Concentration-time data and PK

[0064] FIG. 28: Recombinant C-term GLP1 Analogues and Linkers (FIG. 28 discloses SEQ ID NO: 3333)

[0065] FIG. 29: GLP1 2G10 Fusions In Vitro Activity

[0066] FIG. 30: Mouse PK study (FIG. 30 discloses SEQ ID NO: 3365)

[0067] FIG. 31A-31D: Concentration-time data and PK Single

[0068] FIG. 32: Study design to confirm potency of triple mutants on glp-1 activity

[0069] FIG. 33A-33D: Confirmation of GLP-1 activity in vivo

[0070] FIG. 34: Study design to confirm potency of single mutants on glp-1 activity

[0071] FIG. 35A-35D: Confirmation of GLP-1 activity in vivo

[0072] FIG. 36A-36B: GLP1-GIPR Activity In Vivo 5G12 Ab Single Injection

[0073] FIG. 37A-37D: Concentration-time data and PK parameters

### DETAILED DESCRIPTION OF THE INVENTION

[0074] The present disclosure provides a method of treating a metabolic disorder, such as a disorder of glucose metabolism (e.g. Type 2 diabetes, elevated glucose levels, elevated insulin levels, dyslipidemia, metabolic syndrome (Syndrome X or insulin resistance syndrome), glucosuria, metabolic acidosis, diabetic neuropathy, diabetic nephropathy, diabetic retinopathy, diabetic cardiomyopathy, Type 1 diabetes, obesity and conditions exacerbated by obesity) by blocking or interfering with the biological activity of GIP. In one embodiment, a therapeutically effective amount of an isolated human GIPR binding protein is administered to a subject in need thereof. Methods of administration and delivery are also provided.

[0075] Recombinant polypeptide and nucleic acid methods used herein, including in the Examples, are generally those set forth in Sambrook et al., Molecular Cloning: A Laboratory Manual (Cold Spring Harbor Laboratory Press, 1989) or Current Protocols in Molecular Biology (Ausubel et al., eds., Green Publishers Inc. and Wiley and Sons 1994), both of which are incorporated herein by reference for any purpose.

[0076] The section headings used herein are for organizational purposes only and are not to be construed as limiting the subject matter described.

[0077] Unless otherwise defined herein, scientific and technical terms used in connection with the present application shall have the meanings that are commonly understood by those of ordinary skill in the art. Further, unless otherwise required by context, singular terms shall include pluralities and plural terms shall include the singular.

[0078] Generally, nomenclatures used in connection with, and techniques of, cell and tissue culture, molecular biology, immunology, microbiology, genetics and protein and nucleic acid chemistry and hybridization described herein are those well known and commonly used in the art. The methods and techniques of the present application are generally performed according to conventional methods well known in the art and as described in various general and more specific references that are cited and discussed throughout the present specification unless otherwise indicated. See, e.g., Sambrook et al., Molecular Cloning: A Laboratory Manual, 3rd ed., Cold Spring Harbor Laboratory Press, Cold Spring Harbor, N.Y. (2001), Ausubel et al., Current Protocols in Molecular Biology, Greene Publishing Associates (1992), and Harlow and Lane Antibodies: A Laboratory Manual Cold Spring Harbor Laboratory Press, Cold Spring Harbor, N.Y. (1990), which are incorporated herein by reference. Enzymatic reactions and purification techniques are performed according to manufacturer's specifications, as commonly accomplished in the art or as described herein. The terminology used in connection with, and the laboratory procedures and techniques of, analytical chemistry, synthetic organic chemistry, and medicinal and pharmaceutical chemistry described herein are those well-known and commonly used in the art. Standard techniques can be used for chemical syntheses, chemical analyses, pharmaceutical preparation, formulation, and delivery, and treatment of patients.

[0079] It should be understood that this invention is not limited to the particular methodology, protocols, and reagents, etc., described herein and as such may vary. The terminology used herein is for the purpose of describing particular embodiments only, and is not intended to limit the scope of the disclosed, which is defined solely by the claims.

[0080] Other than in the operating examples, or where otherwise indicated, all numbers expressing quantities of ingredients or reaction conditions used herein should be understood as modified in all instances by the term “about.” The term “about” when used in connection with percentages may mean±1%.

[0081] Following convention, as used herein “a” and “an” mean “one or more” unless specifically indicated otherwise.

[0082] As used herein, the terms “amino acid” and “residue” are interchangeable and, when used in the context of a peptide or polypeptide, refer to both naturally occurring and synthetic amino acids, as well as amino acid analogs, amino acid mimetics and non-naturally occurring amino acids that are chemically similar to the naturally occurring amino acids.

[0083] A “naturally occurring amino acid” is an amino acid that is encoded by the genetic code, as well as those amino acids that are encoded by the genetic code that are modified after synthesis, e.g., hydroxyproline, γ-carboxyglutamate, and O-phosphoserine. An amino acid analog is a compound that has the same basic chemical structure as a naturally occurring amino acid, i.e., an a carbon that is bound to a hydrogen, a carboxyl group, an amino group, and an R group, e.g., homoserine, norleucine, methionine sulfoxide, methionine methyl sulfonium. Such analogs can have modified R groups (e.g., norleucine) or modified peptide backbones, but will retain the same basic chemical structure as a naturally occurring amino acid.

[0084] An “amino acid mimetic” is a chemical compound that has a structure that is different from the general chemical structure of an amino acid, but that functions in a manner similar to a naturally occurring amino acid. Examples include a methacryloyl or acryloyl derivative of an amide, β-, γ-, δ-imino acids (such as piperidine-4-carboxylic acid) and the like.

[0085] A “non-naturally occurring amino acid” is a compound that has the same basic chemical structure as a naturally occurring amino acid, but is not incorporated into a growing polypeptide chain by the translation complex. “Non-naturally occurring amino acid” also includes, but is not limited to, amino acids that occur by modification (e.g., posttranslational modifications) of a naturally encoded amino acid (including but not limited to, the 20 common amino acids) but are not themselves naturally incorporated into a growing polypeptide chain by the translation complex. A non-limiting list of examples of non-naturally occurring amino acids that can be inserted into a polypeptide sequence or substituted for a wild-type residue in polypeptide sequence include n-amino acids, homoamino acids, cyclic amino acids and amino acids with derivatized side chains. Examples include (in the L-form or D-form; abbreviated as in parentheses): citrulline (Cit), homocitrulline (hCit), Na-methylcitrulline (NMeCit), Na-methylhomocitrulline (Na-MeHoCit), ornithine (Om), Na-Methylornithine (Na-MeOm or NMeOrn), sarcosine (Sar), homolysine (hLys or hK), homoarginine (hArg or hR), homoglutamine (hQ), Na-methylarginine (NMeR), Na-methylleucine (Na-MeL or NMeL), N-methylhomolysine (NMeHoK), Na-methylglutamine (NMeQ), norleucine (Nle), norvaline (Nva), 1,2,3,4-tetrahydroisoquinoline (Tic), Octahydroindole-2-carboxylic acid (Oic), 3-(1-naphthyl)alanine (1-Nal), 3-(2-naphthyl)alanine (2-Nal), 1,2,3,4-tetrahydroisoquinoline (Tic), 2-indanylglycine (IgI), para-iodophenylalanine (pI-Phe), para-aminophenylalanine (4AmP or 4-Amino-Phe), 4-guanidino phenylalanine (Guf), glycyllysine (abbreviated “K(Nε-glycyl)” or “K(glycyl)” or “K(gly)”), nitrophenylalanine (nitrophe), aminophenylalanine (aminophe or Amino-Phe), benzylphenylalanine (benzylphe), γ-carboxyglutamic acid (γ-carboxyglu), hydroxyproline (hydroxypro), p-carboxyl-phenylalanine (Cpa), α-aminoadipic acid (Aad), Nα-methyl valine (NMeVal), N-α-methyl leucine (NMeLeu), Nα-methylnorleucine (NMeNle), cyclopentylglycine (Cpg), cyclohexylglycine (Chg), acetylarginine (acetylarg), α,β-diaminopropionoic acid (Dpr), α, γ-diaminobutyric acid (Dab), diaminopropionic acid (Dap), cyclohexylalanine (Cha), 4-methyl-phenylalanine (MePhe), β, β-diphenyl-alanine (BiPhA), aminobutyric acid (Abu), 4-phenyl-phenylalanine (or biphenylalanine; 4Bip), α-amino-isobutyric acid (Aib), beta-alanine, beta-aminopropionic acid, piperidinic acid, aminocaprioic acid, aminoheptanoic acid, aminopimelic acid, desmosine, diaminopimelic acid, N-ethylglycine, N-ethylaspargine, hydroxylysine, allo-hydroxylysine, isodesmosine, allo-isoleucine, N-methylglycine, N-methylisoleucine, N-methylvaline, 4-hydroxyproline (Hyp), γ-carboxyglutamate, ε-N,N,N-trimethyllysine, ε-N-acetyllysine, 0-phosphoserine, N-acetylserine, N-formylmethionine, 3-methylhistidine, 5-hydroxylysine, ω-methylarginine, 4-Amino-O-Phthalic Acid (4APA), and other similar amino acids, and derivatized forms of any of those specifically listed.

[0086] The term “isolated nucleic acid molecule” refers to a single or double-stranded polymer of deoxyribonucleotide or ribonucleotide bases read from the 5′ to the 3′ end (e.g., a GIPR nucleic acid sequence provided herein), or an analog thereof, that has been separated from at least about 50 percent of polypeptides, peptides, lipids, carbohydrates, polynucleotides or other materials with which the nucleic acid is naturally found when total nucleic acid is isolated from the source cells. Preferably, an isolated nucleic acid molecule is substantially free from any other contaminating nucleic acid molecules or other molecules that are found in the natural environment of the nucleic acid that would interfere with its use in polypeptide production or its therapeutic, diagnostic, prophylactic or research use.

[0087] The term “isolated polypeptide” refers to a polypeptide (e.g., a GIPR polypeptide sequence provided herein or an antigen binding protein of the present invention) that has been separated from at least about 50 percent of polypeptides, peptides, lipids, carbohydrates, polynucleotides, or other materials with which the polypeptide is naturally found when isolated from a source cell. Preferably, the isolated polypeptide is substantially free from any other contaminating polypeptides or other contaminants that are found in its natural environment that would interfere with its therapeutic, diagnostic, prophylactic or research use.

[0088] A composition of the present invention that includes a GLP-1 receptor agonist of the present invention fused via a peptide bond of its C-terminus to the N-terminus of an anti-GIPR antigen binding protein of the invention or is a “fusion protein” or “fusion molecule”, or simply “fusion” of the present invention. A peptide linker sequence may be interposed between the GLP-1 receptor agonist peptide and the anti-GIPR antigen binding protein such that the GLP-1 receptor agonist of the present invention is fused via a peptide bond of its C-terminus to the N-terminus of the linker peptide, and the C-terminus of the linker peptide is fused via a peptide bond to the N-terminus of the light chain variable region or to the N-terminus of the heavy chain variable region of the anti-GIPR antigen binding protein. Although the GLP-1 receptor agonists and/or linker peptides can be fused to the anti-GIPR antigen binding protein after translation or purification of the anti-GIPR antigen binding protein, in one embodiment the fusion proteins of the present invention can be produced via expression of the full length fusion protein in a suitable cell type without a further conjugation reaction.

[0089] The term “encoding” refers to a polynucleotide sequence encoding one or more amino acids. The term does not require a start or stop codon.

[0090] The terms “identical” and percent “identity,” in the context of two or more nucleic acids or polypeptide sequences, refer to two or more sequences or subsequences that are the same. “Percent identity” means the percent of identical residues between the amino acids or nucleotides in the compared molecules and is calculated based on the size of the smallest of the molecules being compared. For these calculations, gaps in alignments (if any) can be addressed by a particular mathematical model or computer program (i.e., an “algorithm”). Methods that can be used to calculate the identity of the aligned nucleic acids or polypeptides include those described in Computational Molecular Biology, (Lesk, A. M., ed.), (1988) New York: Oxford University Press; Biocomputing Informatics and Genome Projects, (Smith, D. W., ed.), 1993, New York: Academic Press; Computer Analysis of Sequence Data, Part I, (Griffin, A. M., and Griffin, H. G., eds.), 1994, New Jersey: Humana Press; von Heinje, G., (1987) Sequence Analysis in Molecular Biology, New York: Academic Press; Sequence Analysis Primer, (Gribskov, M. and Devereux, J., eds.), 1991, New York: M. Stockton Press; and Carillo et al., (1988) SIAM J. Applied Math. 48:1073.

[0091] In calculating percent identity, the sequences being compared are aligned in a way that gives the largest match between the sequences. The computer program used to determine percent identity is the GCG program package, which includes GAP (Devereux et al., (1984) Nucl. Acid Res. 12:387; Genetics Computer Group, University of Wisconsin, Madison, WI). The computer algorithm GAP is used to align the two polypeptides or polynucleotides for which the percent sequence identity is to be determined. The sequences are aligned for optimal matching of their respective amino acid or nucleotide (the “matched span”, as determined by the algorithm). A gap opening penalty (which is calculated as 3× the average diagonal, wherein the “average diagonal” is the average of the diagonal of the comparison matrix being used; the “diagonal” is the score or number assigned to each perfect amino acid match by the particular comparison matrix) and a gap extension penalty (which is usually 1/10 times the gap opening penalty), as well as a comparison matrix such as PAM 250 or BLOSUM 62 are used in conjunction with the algorithm. In certain embodiments, a standard comparison matrix (see, Dayhoff et al., (1978) Atlas of Protein Sequence and Structure 5:345-352 for the PAM 250 comparison matrix; Henikoff et al., (1992) Proc. Natl. Acad. Sci. U.S.A. 89:10915-10919 for the BLOSUM 62 comparison matrix) is also used by the algorithm.

[0092] Recommended parameters for determining percent identity for polypeptides or nucleotide sequences using the GAP program are the following:
[0093] Algorithm: Needleman et al., 1970, J. Mol. Biol. 48:443-453;
[0094] Comparison matrix: BLOSUM 62 from Henikoff et al., 1992, supra;
[0095] Gap Penalty: 12 (but with no penalty for end gaps)
[0096] Gap Length Penalty: 4
[0097] Threshold of Similarity: 0

[0098] Certain alignment schemes for aligning two amino acid sequences can result in matching of only a short region of the two sequences, and this small aligned region can have very high sequence identity even though there is no significant relationship between the two full-length sequences. Accordingly, the selected alignment method (e.g., the GAP program) can be adjusted if so desired to result in an alignment that spans at least 50 contiguous amino acids of the target polypeptide.

[0099] The terms “GIPR polypeptide” and “GIPR protein” are used interchangeably and mean a naturally-occurring wild-type polypeptide expressed in a mammal, such as a human or a mouse, and includes naturally occurring alleles (e.g., naturally occurring allelic forms of human GIPR protein). For purposes of this disclosure, the term “GIPR polypeptide” can be used interchangeably to refer to any full-length GIPR polypeptide, e.g., SEQ ID NO: 3141, which consists of 466 amino acid residues and which is encoded by the nucleotide sequence SEQ ID NO: 3142, or SEQ ID NO: 3143, which consists of 430 amino acid residues and which is encoded by the nucleic acid sequence SEQ ID NO: 3144, or SEQ ID NO: 3145, which consists of 493 amino acid resides and which is encoded by the nucleic acid sequence of SEQ ID NO: 3146, or SEQ ID NO. 3147, which consists of 460 amino acids residues and which is encoded by the nucleic acid sequence of SEQ ID NO: 3148, or SEQ ID NO. 3149, which consists of 230 amino acids residues and which is encoded by the nucleic acid sequence of SEQ ID NO: 3150.

[0100] The term “GIPR polypeptide” also encompasses a GIPR polypeptide in which a naturally occurring GIPR polypeptide sequence (e.g., SEQ ID NOs: 3141, 3143 or 3145) has been modified. Such modifications include, but are not limited to, one or more amino acid substitutions, including substitutions with non-naturally occurring amino acids non-naturally-occurring amino acid analogs and amino acid mimetics.

[0101] In various embodiments, a GIPR polypeptide comprises an amino acid sequence that is at least about 85 percent identical to a naturally-occurring GIPR polypeptide (e.g., SEQ ID NOs: 3141, 3143 or 3145). In other embodiments, a GIPR polypeptide comprises an amino acid sequence that is at least about 90 percent, or about 95, 96, 97, 98, or 99 percent identical to a naturally-occurring GIPR polypeptide amino acid sequence (e.g., SEQ ID NOs: 3141, 3143 or 3145). Such GIPR polypeptides preferably, but need not, possess at least one activity of a wild-type GIPR polypeptide, such as the ability to bind GIP. The present invention also encompasses nucleic acid molecules encoding such GIPR polypeptide sequences.

[0102] The terms “GIPR activity assay” (also referred to as a “GIPR functional assay”) means an assay that can be used to measure GIP or a GIP binding protein activity in a cellular setting. In one embodiment, the “activity” (or “functional”) assay” can be a cAMP assay in GIPR expressing cells, in which GIP can induce cAMP signal, and the activity of a GIP/GIPR binding protein could be measured in the presence/absence of GIP ligand, in which IC50/EC50 and degree of inhibition/activation can be obtained (Biochemical and Biophysical Research Communications (2002) 290:1420-1426). In another embodiment, the “activity” (or “functional”) assay can be an insulin secretion assay in pancreatic beta cells, in which GIP can induce glucose-dependent insulin secretion, and the activity of a GIP/GIPR binding protein could be measured in the presence/absence of GIP ligand, in which IC50/EC50 and degree of inhibition/activation can be obtained (Biochemical and Biophysical Research Communications (2002) 290:1420-1426).

[0103] The term “GIPR binding assay” means an assay that can be used to measure binding of GIP to GIPR. In one embodiment, “GIPR binding assay” can be an assay using FMAT or FACS that measures fluorescence-labeled GIP binding to GIPR expression cells, and GIP/GIPR binding protein's activity can be measured for displacing fluorescence-labeled GIP binding to GIPR expression cells. In another embodiment, “GIPR binding assay” can be an assay that measures radioactive-labeled GIP binding to GIPR expression cells, and GIP/GIPR binding protein's activity can be measured for displacing radioactive labeled GIP binding to GIPR expression cells (Biochimica et Biophysica Acta (2001) 1547:143-155).

[0104] The terms “GIP”, “Gastric inhibitory polypeptide”, “glucose-dependent insulinotropic peptide” and “GIP ligand” are used interchangeably and mean a naturally-occurring wild-type polypeptide expressed in a mammal, such as a human or a mouse, and includes naturally occurring alleles (e.g., naturally occurring allelic forms of human GIP protein). For purposes of this disclosure, the term “GIP” can be used interchangeably to refer to any mature GIP polypeptide.

[0105] The 42 amino acid sequence of mature human GIP is:

(SEQ ID NO: 3151)
YAEGTFISDY SIAMDKIHQQ DEVNWLLAQK GKKNDWKHNI TQ

[0106] and is encoded by the DNA sequence:

(SEQ ID NO: 3152)
tatgcggaag gcacctttat tagcgattat agcattgcga
tggataaaat tcatcagcag gattttgtga actggctgct
ggcgcagaaa ggcaaaaaaa acgattggaa acataacatt
acccag.

[0107] The 42 amino acid sequence of mature murine GIP is:

(SEQ ID NO: 3153)
YAEGTFISDY SIAMDKIRQQ DEVNWLLAQR GKKSDWKHNI TQ

[0108] and is encoded by the DNA sequence:

(SEQ ID NO: 3154)
tatgcggaag gcacctttat tagcgattat agcattgcga
tggataaaat tcgccagcag gattttgtga actggctgct
ggcgcagcgc ggcaaaaaaa gcgattggaa acataacatt
acccag.

[0109] The 42 amino acid sequence of mature rat GIP is:

(SEQ ID NO: 3155)
YAEGTFISDY SIAMDKIRQQ DEVNWLLAQK GKKNDWKHNL TQ

[0110] and is encoded by the DNA sequence:

(SEQ ID NO: 3156)
tatgcggaag gcacctttat tagcgattat agcattgcga
tggataaaat tcgccagcag gattttgtga actggctgctg
gcgcagaaag gcaaaaaaaa cgattggaaa cataacctga
cccag.

[0111] An “antigen binding protein” as used herein means any protein that specifically binds a specified target antigen, such as a GIPR polypeptide (e.g., a human GIPR polypeptide such as provided in SEQ ID NOs: 3141, 3143 or 3145). The term encompasses intact antibodies that comprise at least two full-length heavy chains and two full-length light chains, as well as derivatives, variants, fragments, and mutations thereof. Examples of antibody fragments include Fab, Fab′, F(ab′)₂, and Fv fragments. An antigen binding protein also includes domain antibodies such as nanobodies and scFvs as described further below.

[0112] In general, a GIPR antigen binding protein is said to “specifically bind” its target antigen GIPR when the antigen binding protein exhibits essentially background binding to non-GIPR molecules. An antigen binding protein that specifically binds GIPR may, however, cross-react with GIPR polypeptides from different species. Typically, a GIPR antigen binding protein specifically binds human GIPR when the dissociation constant (KD) is ≤10⁻⁷ M as measured via a surface plasma resonance technique (e.g., BIACore, GE-Healthcare Uppsala, Sweden) or Kinetic Exclusion Assay (KinExA, Sapidyne, Boise, Idaho). A GIPR antigen binding protein specifically binds human GIPR with “high affinity” when the KD is ≤5×10⁻⁹ M, and with “very high affinity” when the KD is ≤5×10⁻¹⁰ M, as measured using methods described.

[0113] “Antigen binding region” means a protein, or a portion of a protein, that specifically binds a specified antigen. For example, that portion of an antigen binding protein that contains the amino acid residues that interact with an antigen and confer on the antigen binding protein its specificity and affinity for the antigen is referred to as “antigen binding region.” An antigen binding region typically includes one or more “complementary binding regions” (“CDRs”) of an immunoglobulin, single-chain immunoglobulin, or camelid antibody. Certain antigen binding regions also include one or more “framework” regions. A “CDR” is an amino acid sequence that contributes to antigen binding specificity and affinity. “Framework” regions can aid in maintaining the proper conformation of the CDRs to promote binding between the antigen binding region and an antigen.

[0114] A “recombinant protein”, including a recombinant GIPR antigen binding protein, is a protein made using recombinant techniques, i.e., through the expression of a recombinant nucleic acid as described herein. Methods and techniques for the production of recombinant proteins are well known in the art.

[0115] The term “antibody” refers to an intact immunoglobulin of any isotype, or a fragment thereof that can compete with the intact antibody for specific binding to the target antigen, and includes, for instance, chimeric, humanized, fully human, and bispecific antibodies. An “antibody” as such is a species of an antigen binding protein. An intact antibody generally will comprise at least two full-length heavy chains and two full-length light chains. Antibodies may be derived solely from a single source, or may be “chimeric,” that is, different portions of the antibody may be derived from two different antibodies as described further below. The antigen binding proteins, antibodies, or binding fragments may be produced in hybridomas, by recombinant DNA techniques, or by enzymatic or chemical cleavage of intact antibodies.

[0116] The term “light chain” as used with respect to an antibody or fragments thereof includes a full-length light chain and fragments thereof having sufficient variable region sequence to confer binding specificity. A full-length light chain includes a variable region domain, VL, and a constant region domain, CL. The variable region domain of the light chain is at the amino-terminus of the polypeptide. Light chains include kappa chains and lambda chains.

[0117] The term “heavy chain” as used with respect to an antibody or fragment thereof includes a full-length heavy chain and fragments thereof having sufficient variable region sequence to confer binding specificity. A full-length heavy chain includes a variable region domain, VH, and three constant region domains, CH1, CH2, and CH3. The VH domain is at the amino-terminus of the polypeptide, and the CH domains are at the carboxyl-terminus, with the CH3 being closest to the carboxy-terminus of the polypeptide. Heavy chains may be of any isotype, including IgG (including IgG1, IgG2, IgG3 and IgG4 subtypes), IgA (including IgA1 and IgA2 subtypes), IgM and IgE.

[0118] The term “immunologically functional fragment” (or simply “fragment”) of an antibody or immunoglobulin chain (heavy or light chain), as used herein, is an antigen binding protein comprising a portion (regardless of how that portion is obtained or synthesized) of an antibody that lacks at least some of the amino acids present in a full-length chain but which is capable of specifically binding to an antigen. Such fragments are biologically active in that they bind specifically to the target antigen and can compete with other antigen binding proteins, including intact antibodies, for specific binding to a given epitope.

[0119] These biologically active fragments may be produced by recombinant DNA techniques, or may be produced by enzymatic or chemical cleavage of antigen binding proteins, including intact antibodies. Immunologically functional immunoglobulin fragments include, but are not limited to, Fab, Fab′, and F(ab′)₂ fragments.

[0120] In another embodiment, Fvs, domain antibodies and scFvs, and may be derived from an antibody of the present invention.

[0121] It is contemplated further that a functional portion of the antigen binding proteins disclosed herein, for example, one or more CDRs, could be covalently bound to a second protein or to a small molecule to create a therapeutic agent directed to a particular target in the body, possessing bifunctional therapeutic properties, or having a prolonged serum half-life.

[0122] A “Fab fragment” is comprised of one light chain and the CH1 and variable regions of one heavy chain. The heavy chain of a Fab molecule cannot form a disulfide bond with another heavy chain molecule.

[0123] An “Fc” region contains two heavy chain fragments comprising the CH2 and CH3 domains of an antibody. The two heavy chain fragments are held together by two or more disulfide bonds and by hydrophobic interactions of the CH3 domains.

[0124] An “Fab′ fragment” contains one light chain and a portion of one heavy chain that contains the VH domain and the CHI domain and also the region between the CHI and CH2 domains, such that an interchain disulfide bond can be formed between the two heavy chains of two Fab′ fragments to form an F(ab′)2 molecule.

[0125] An “F(ab′)2 fragment” contains two light chains and two heavy chains containing a portion of the constant region between the CHI and CH2 domains, such that an interchain disulfide bond is formed between the two heavy chains. A F(ab′)2 fragment thus is composed of two Fab′ fragments that are held together by a disulfide bond between the two heavy chains.

[0126] The “Fv region” comprises the variable regions from both the heavy and light chains, but lacks the constant regions.

[0127] “Single chain antibodies” or “scFvs” are Fv molecules in which the heavy and light chain variable regions have been connected by a flexible linker to form a single polypeptide chain, which forms an antigen-binding region. scFvs are discussed in detail in International Patent Application Publication No. WO 88/01649 and U.S. Pat. Nos. 4,946,778 and 5,260,203, the disclosures of which are incorporated by reference.

[0128] A “domain antibody” or “single chain immunoglobulin” is an immunologically functional immunoglobulin fragment containing only the variable region of a heavy chain or the variable region of a light chain. Examples of domain antibodies include Nanobodies®. In some instances, two or more VH regions are covalently joined with a peptide linker to create a bivalent domain antibody. The two VH regions of a bivalent domain antibody may target the same or different antigens.

[0129] A “bivalent antigen binding protein” or “bivalent antibody” comprises two antigen binding regions. In some instances, the two binding regions have the same antigen specificities. Bivalent antigen binding proteins and bivalent antibodies may be bispecific, see, infra.

[0130] A multispecific antigen binding protein” or “multispecific antibody” is one that targets more than one antigen or epitope.

[0131] A “bispecific,” “dual-specific” or “bifunctional” antigen binding protein or antibody is a hybrid antigen binding protein or antibody, respectively, having two different antigen binding sites. Bispecific antigen binding proteins and antibodies are a species of multispecific antigen binding protein or multispecific antibody and may be produced by a variety of methods including, but not limited to, fusion of hybridomas or linking of Fab′ fragments. See, e.g., Songsivilai and Lachmann, 1990, Clin. Exp. Immunol. 79:315-321; Kostelny et al., 1992, J. Immunol. 148:1547-1553. The two binding sites of a bispecific antigen binding protein or antibody will bind to two different epitopes, which may reside on the same or different protein targets.

[0132] The term “compete” when used in the context of antigen binding proteins (e.g., antibodies) means competition between antigen binding proteins is determined by an assay in which the antigen binding protein (e.g., antibody or immunologically functional fragment thereof) under test prevents or inhibits specific binding of a reference antigen binding protein to a common antigen (e.g., GIPR or a fragment thereof). Numerous types of competitive binding assays can be used, for example: solid phase direct or indirect radioimmunoassay (RIA), solid phase direct or indirect enzyme immunoassay (EIA), sandwich competition assay (see, e.g., Stahli et al., 1983, Methods in Enzymology 9:242-253); solid phase direct biotin-avidin EIA (see, e.g., Kirkland et al., 1986, J. Immunol. 137:3614-3619) solid phase direct labeled assay, solid phase direct labeled sandwich assay (see, e.g., Harlow and Lane, 1988, Antibodies, A Laboratory Manual, Cold Spring Harbor Press); solid phase direct label RIA using 1-125 label (see, e.g., Morel et al., 1988, Molec. Immunol. 25:7-15); solid phase direct biotin-avidin EIA (see, e.g., Cheung, et al., 1990, Virology 176:546-552); and direct labeled RIA (Moldenhauer et al., 1990, Scand. J. Immunol. 32:77-82). Typically, such an assay involves the use of purified antigen bound to a solid surface or cells bearing either of these, an unlabelled test antigen binding protein and a labeled reference antigen binding protein. Competitive inhibition is measured by determining the amount of label bound to the solid surface or cells in the presence of the test antigen binding protein. Usually the test antigen binding protein is present in excess. Additional details regarding methods for determining competitive binding are provided in the examples herein. Usually, when a competing antigen binding protein is present in excess, it will inhibit specific binding of a reference antigen binding protein to a common antigen by at least 40%, 45%, 50%, 55%, 60%, 65%, 70% or 75%. In some instances, binding is inhibited by at least 80%, 85%, 90%, 95%, or 97% or more.

[0133] The term “antigen” refers to a molecule or a portion of a molecule capable of being bound by a selective binding agent, such as an antigen binding protein (including, e.g., an antibody), and additionally capable of being used in an animal to produce antibodies capable of binding to that antigen. An antigen may possess one or more epitopes that are capable of interacting with different antigen binding proteins, e.g., antibodies.

[0134] The term “epitope” is the portion of a molecule that is bound by an antigen binding protein (for example, an antibody). The term includes any determinant capable of specifically binding to an antigen binding protein, such as an antibody. An epitope can be contiguous or non-contiguous (discontinuous) (e.g., in a polypeptide, amino acid residues that are not contiguous to one another in the polypeptide sequence but that within in context of the molecule are bound by the antigen binding protein). A conformational epitope is an epitope that exists within the conformation of an active protein but is not present in a denatured protein. In certain embodiments, epitopes may be mimetic in that they comprise a three dimensional structure that is similar to an epitope used to generate the antigen binding protein, yet comprise none or only some of the amino acid residues found in that epitope used to generate the antigen binding protein. Most often, epitopes reside on proteins, but in some instances may reside on other kinds of molecules, such as nucleic acids. Epitope determinants may include chemically active surface groupings of molecules such as amino acids, sugar side chains, phosphoryl or sulfonyl groups, and may have specific three dimensional structural characteristics, and/or specific charge characteristics. Generally, antigen binding proteins specific for a particular target antigen will preferentially recognize an epitope on the target antigen in a complex mixture of proteins and/or macromolecules.

[0135] As used herein, “substantially pure” means that the described species of molecule is the predominant species present, that is, on a molar basis it is more abundant than any other individual species in the same mixture. In certain embodiments, a substantially pure molecule is a composition wherein the object species comprises at least 50% (on a molar basis) of all macromolecular species present. In other embodiments, a substantially pure composition will comprise at least 80%, 85%, 90%, 95%, 96%, 97%, 98%, or 99% of all macromolecular species present in the composition. In other embodiments, the object species is purified to essential homogeneity wherein contaminating species cannot be detected in the composition by conventional detection methods and thus the composition consists of a single detectable macromolecular species.

[0136] The term “treating” refers to any indicia of success in the treatment or amelioration of an injury, pathology or condition, including any objective or subjective parameter such as abatement; remission; diminishing of symptoms or making the injury, pathology or condition more tolerable to the patient; slowing in the rate of degeneration or decline; making the final point of degeneration less debilitating; improving a patient's physical or mental well-being. The treatment or amelioration of symptoms can be based on objective or subjective parameters; including the results of a physical examination, neuropsychiatric exams, and/or a psychiatric evaluation. For example, certain methods presented herein successfully treat cardiovascular disease such as atherosclerosis by decreasing the incidence of cardiovascular disease, causing remission of cardiovascular disease and/or ameliorating a symptom associated with cardiovascular disease.

[0137] An “effective amount” is generally an amount sufficient to reduce the severity and/or frequency of symptoms, eliminate the symptoms and/or underlying cause, prevent the occurrence of symptoms and/or their underlying cause, and/or improve or remediate the damage that results from or is associated with the disease state (e.g., diabetes, obesity, dyslipidemia, elevated glucose levels, elevated insulin levels or diabetic nephropathy. In some embodiments, the effective amount is a therapeutically effective amount or a prophylactically effective amount. A “therapeutically effective amount” is an amount sufficient to remedy a disease state (e.g. atherosclerosis) or symptoms, particularly a state or symptoms associated with the disease state, or otherwise prevent, hinder, retard or reverse the progression of the disease state or any other undesirable symptom associated with the disease in any way whatsoever. A “prophylactically effective amount” is an amount of a pharmaceutical composition that, when administered to a subject, will have the intended prophylactic effect, e.g., preventing or delaying the onset (or reoccurrence) of the disease state, or reducing the likelihood of the onset (or reoccurrence) of the disease state or associated symptoms. The full therapeutic or prophylactic effect does not necessarily occur by administration of one dose, and may occur only after administration of a series of doses. Thus, a therapeutically or prophylactically effective amount may be administered in one or more administrations.

[0138] The terms “therapeutically effective dose” and “therapeutically effective amount,” as used herein, means an amount of a GIPR binding protein that elicits a biological or medicinal response in a tissue system, animal, or human being sought by a researcher, physician, or other clinician, which includes alleviation or amelioration of the symptoms of the disease or disorder being treated, i.e., an amount of a GIPR binding protein that supports an observable level of one or more desired biological or medicinal response, for example lowering blood glucose, insulin, triglyceride, or cholesterol levels; reducing body weight; or improving glucose tolerance, energy expenditure, or insulin sensitivity.

[0139] The term “polynucleotide” or “nucleic acid” includes both single-stranded and double-stranded nucleotide polymers. The nucleotides comprising the polynucleotide can be ribonucleotides or deoxyribonucleotides or a modified form of either type of nucleotide. The modifications include base modifications such as bromouridine and inosine derivatives, ribose modifications such as 2′,3′-dideoxyribose, and internucleotide linkage modifications such as phosphorothioate, phosphorodithioate, phosphoroselenoate, phosphorodiselenoate, phosphoroanilothioate, phoshoraniladate and phosphoroamidate.

[0140] The term “oligonucleotide” means a polynucleotide comprising 200 or fewer nucleotides. In some embodiments, oligonucleotides are 10 to 60 bases in length. In other embodiments, oligonucleotides are 12, 13, 14, 15, 16, 17, 18, 19, or 20 to 40 nucleotides in length. Oligonucleotides may be single stranded or double stranded, e.g., for use in the construction of a mutant gene. Oligonucleotides may be sense or antisense oligonucleotides. An oligonucleotide can include a label, including a radiolabel, a fluorescent label, a hapten or an antigenic label, for detection assays. Oligonucleotides may be used, for example, as PCR primers, cloning primers or hybridization probes.

[0141] An “isolated nucleic acid molecule” means a DNA or RNA of genomic, mRNA, cDNA, or synthetic origin or some combination thereof which is not associated with all or a portion of a polynucleotide in which the isolated polynucleotide is found in nature, or is linked to a polynucleotide to which it is not linked in nature. For purposes of this disclosure, it should be understood that “a nucleic acid molecule comprising” a particular nucleotide sequence does not encompass intact chromosomes. Isolated nucleic acid molecules “comprising” specified nucleic acid sequences may include, in addition to the specified sequences, coding sequences for up to ten or even up to twenty other proteins or portions thereof, or may include operably linked regulatory sequences that control expression of the coding region of the recited nucleic acid sequences, and/or may include vector sequences.

[0142] Unless specified otherwise, the left-hand end of any single-stranded polynucleotide sequence discussed herein is the 5′ end; the left-hand direction of double-stranded polynucleotide sequences is referred to as the 5′ direction. The direction of 5′ to 3′ addition of nascent RNA transcripts is referred to as the transcription direction; sequence regions on the DNA strand having the same sequence as the RNA transcript that are 5′ to the 5′ end of the RNA transcript are referred to as “upstream sequences;” sequence regions on the DNA strand having the same sequence as the RNA transcript that are 3′ to the 3′ end of the RNA transcript are referred to as “downstream sequences.”

[0143] The term “control sequence” refers to a polynucleotide sequence that can affect the expression and processing of coding sequences to which it is ligated. The nature of such control sequences may depend upon the host organism. In particular embodiments, control sequences for prokaryotes may include a promoter, a ribosomal binding site, and a transcription termination sequence. For example, control sequences for eukaryotes may include promoters comprising one or a plurality of recognition sites for transcription factors, transcription enhancer sequences, and transcription termination sequences. “Control sequences” can include leader sequences and/or fusion partner sequences.

[0144] The term “vector” means any molecule or entity (e.g., nucleic acid, plasmid, bacteriophage or virus) used to transfer protein coding information into a host cell.

[0145] The term “expression vector” or “expression construct” refers to a vector that is suitable for transformation of a host cell and contains nucleic acid sequences that direct and/or control (in conjunction with the host cell) expression of one or more heterologous coding regions operatively linked thereto. An expression construct may include, but is not limited to, sequences that affect or control transcription, translation, and, if introns are present, affect RNA splicing of a coding region operably linked thereto.

[0146] As used herein, “operably linked” means that the components to which the term is applied are in a relationship that allows them to carry out their inherent functions under suitable conditions. For example, a control sequence in a vector that is “operably linked” to a protein coding sequence is ligated thereto so that expression of the protein coding sequence is achieved under conditions compatible with the transcriptional activity of the control sequences.

[0147] The term “host cell” means a cell that has been transformed with a nucleic acid sequence and thereby expresses a gene of interest. The term includes the progeny of the parent cell, whether or not the progeny is identical in morphology or in genetic make-up to the original parent cell, so long as the gene of interest is present.

[0148] The terms “polypeptide” or “protein” are used interchangeably herein to refer to a polymer of amino acid residues. The terms also apply to amino acid polymers in which one or more amino acid residues is an analog or mimetic of a corresponding naturally occurring amino acid, as well as to naturally occurring amino acid polymers. The terms can also encompass amino acid polymers that have been modified, e.g., by the addition of carbohydrate residues to form glycoproteins, or phosphorylated. Polypeptides and proteins can be produced by a naturally-occurring and non-recombinant cell; or it is produced by a genetically-engineered or recombinant cell, and comprise molecules having the amino acid sequence of the native protein, or molecules having deletions from, additions to, and/or substitutions of one or more amino acids of the native sequence. The terms “polypeptide” and “protein” specifically encompass GIPR antigen binding proteins, antibodies, or sequences that have deletions from, additions to, and/or substitutions of one or more amino acids of an antigen-binding protein. The term “polypeptide fragment” refers to a polypeptide that has an amino-terminal deletion, a carboxyl-terminal deletion, and/or an internal deletion as compared with the full-length protein. Such fragments may also contain modified amino acids as compared with the full-length protein. In certain embodiments, fragments are about five to 500 amino acids long. For example, fragments may be at least 5, 6, 8, 10, 14, 20, 50, 70, 100, 110, 150, 200, 250, 300, 350, 400, or 450 amino acids long. Useful polypeptide fragments include immunologically functional fragments of antibodies, including binding domains.

[0149] The term “isolated protein” means that a subject protein (1) is free of at least some other proteins with which it would normally be found, (2) is essentially free of other proteins from the same source, e.g., from the same species, (3) is expressed by a cell from a different species, (4) has been separated from at least about 50 percent of polynucleotides, lipids, carbohydrates, or other materials with which it is associated in nature, (5) is operably associated (by covalent or noncovalent interaction) with a polypeptide with which it is not associated in nature, or (6) does not occur in nature. Typically, an “isolated protein” constitutes at least about 5%, at least about 10%, at least about 25%, or at least about 50% of a given sample. Genomic DNA, cDNA, mRNA or other RNA, of synthetic origin, or any combination thereof may encode such an isolated protein. Preferably, the isolated protein is substantially free from proteins or polypeptides or other contaminants that are found in its natural environment that would interfere with its therapeutic, diagnostic, prophylactic, research or other use.

[0150] A “variant” of a polypeptide (e.g., an antigen binding protein such as an antibody) comprises an amino acid sequence wherein one or more amino acid residues are inserted into, deleted from and/or substituted into the amino acid sequence relative to another polypeptide sequence.

[0151] The term “naturally occurring” as used throughout the specification in connection with biological materials such as polypeptides, nucleic acids, host cells, and the like, refers to materials which are found in nature.

[0152] A “subject” or “patient” as used herein can be any mammal. In a typical embodiment, the subject or patient is a human.

[0153] As disclosed herein, a GIPR polypeptide described by the instant disclosure can be engineered and/or produced using standard molecular biology methodology. In various examples, a nucleic acid sequence encoding a GIPR, which can comprise all or a portion of SEQ ID NOs:1, 3 or 5, can be isolated and/or amplified from genomic DNA, or cDNA using appropriate oligonucleotide primers. Primers can be designed based on the nucleic and amino acid sequences provided herein according to standard (RT)-PCR amplification techniques. The amplified GIPR nucleic acid can then be cloned into a suitable vector and characterized by DNA sequence analysis.

[0154] Oligonucleotides for use as probes in isolating or amplifying all or a portion of the GIPR sequences provided herein can be designed and generated using standard synthetic techniques, e.g., automated DNA synthesis apparatus, or can be isolated from a longer sequence of DNA.

The 466 amino acid sequence of human GIPR is (Volz et al., FEBS Lett. 373:23-29
(1995); NCBI Reference Sequence: NP_0001555):
(SEQ ID NO: 3141)
MTTSPILQLL LRLSLCGLLL QRAETGSKGQ TAGELYQRWE RYRRECQETL
AAAEPPSGLA CNGSFDMYVC WDYAAPNATA RASCPWYLPW HHHVAAGFVL
RQCGSDGQWG LWRDHTQCEN PEKNEAFLDQ RLILERLQVM YTVGYSLSLA
TLLLALLILS LFRRLHCTRN YIHINLFTSF MLRAAAILSR DRLLPRPGPY
LGDQALALWN QALAACRTAQ IVTQYCVGAN YTWLLVEGVY LHSLLVLVGG
SEEGHFRYYL LLGWGAPALF VIPWVIVRYL YENTQCWERN EVKAIWWIIR
TPILMTILIN FLIFIRILGI LLSKLRTRQM RCRDYRLRLA RSTLTLVPLL
GVHEVVFAPV TEEQARGALR FAKLGFEIFL SSFQGFLVSV LYCFINKEVQ
SEIRRGWHHC RLRRSLGEEQ RQLPERAFRA LPSGSGPGEV PTSRGLSSGT
LPGPGNEASR ELESYC
and
is encoded by the DNA sequence (NCBI Reference Sequence: NM_000164):
(SEQ ID NO: 3142)
ggcagcggtg gcaggggctg caggagcaag tgaccaggag caggactggg
gacaggcctg atcgcccctg cacgaaccag acccttcgcc gccctcacga
tgactacctc tccgatcctg cagctgctgc tgcggctctc actgtgcggg
ctgctgctcc agagggcgga gacaggctct aaggggcaga cggcggggga
gctgtaccag cgctgggaac ggtaccgcag ggagtgccag gagaccttgg
cagccgcgga accgccttca ggcctcgcct gtaacgggtc cttcgatatg
tacgtctgct gggactatgc tgcacccaat gccactgccc gtgcgtcctg
cccctggtac ctgccctggc accaccatgt ggctgcaggt ttcgtcctcc
gccagtgtgg cagtgatggc caatggggac tttggagaga ccatacacaa
tgtgagaacc cagagaagaa tgaggccttt ctggaccaaa ggctcatctt
ggagcggttg caggtcatgt acactgtcgg ctactccctg tctctcgcca
cactgctgct agccctgctc atcttgagtt tgttcaggcg gctacattgc
actagaaact atatccacat caacctgttc acgtctttca tgctgcgagc
tgcggccatt ctcagccgag accgtctgct acctcgacct ggcccctacc
ttggggacca ggcccttgcg ctgtggaacc aggccctcgc tgcctgccgc
acggcccaga tcgtgaccca gtactgcgtg ggtgccaact acacgtggct
gctggtggag ggcgtctacc tgcacagtct cctggtgctc gtgggaggct
ccgaggaggg ccacttccgc tactacctgc tcctcggctg gggggccccc
gcgcttttcg tcattccctg ggtgatcgtc aggtacctgt acgagaacac
gcagtgctgg gagcgcaacg aagtcaaggc catttggtgg attatacgga
cccccatcct catgaccatc ttgattaatt tcctcatttt tatccgcatt
cttggcattc tcctgtccaa gctgaggaca cggcaaatgc gctgccggga
ttaccggctg aggctggctc gctccacgct gacgctggtg cccctgctgg
gtgtccacga ggtggtgttt gctcccgtga cagaggaaca ggcccggggc
gccctgcgct tcgccaagct cggctttgag atcttcctca gctccttcca
gggcttcctg gtcagcgtcc tctactgctt catcaacaag gaggtgcagt
cggagatccg ccgtggctgg caccactgcc gcctgcgccg cagcctgggc
gaggagcaac gccagctccc ggagcgcgcc ttccgggccc tgccctccgg
ctccggcccg ggcgaggtcc ccaccagccg cggcttgtcc tcggggaccc
tcccagggcc tgggaatgag gccagccggg agttggaaag ttactgctag
ggggcgggat ccccgtgtct gttcagttag catggattta ttgagtgcca
actgcgtgcc aggcccagta cggaggacgc tggggaaatg gtgaaggaaa
cagaaaaaag gtccctgccc ttctggagat gacaactgag tggggaaaac
agaccgtgaa cacaaaacat caagttccac acacgctatg gaatggttat
gaagggaagc gagaaggggg cctagggtgg tctgggaggc gtctccaagg
aggtgacact taagccatcc ccgaaagagg tgaaagagat cactttgggg
agagctggag aacaggattc taggcggaag cgatagcata ggcaaaggcc
cttgggcagg aaggcgctca gccttggctg gagtagaatt aagtcagagc
caacaggtgg ggagagacag agaagtgggc aggggcaccc aagttgggat
ttcatttcag gtgcattgga gattcttagg agtgtctctt gggggtaata
ttttattttt taaaaaatga ggat.
A 430 amino acid isoform of human GIPR (isoform X1), predicted by automated
computational analysis, has the sequence (NCBI Reference Sequence XP_005258790):
(SEQ ID NO: 3143)
MTTSPILQLL LRLSLCGLLL QRAETGSKGQ TAGELYQRWE RYRRECQETL
AAAEPPSVAA GFVLRQCGSD GQWGLWRDHT QCENPEKNEA FLDQRLILER
LQVMYTVGYS LSLATLLLAL LILSLFRRLH CTRNYIHINL FTSFMLRAAA
ILSRDRLLPR PGPYLGDQAL ALWNQALAAC RTAQIVTQYC VGANYTWLLV
EGVYLHSLLV LVGGSEEGHF RYYLLLGWGA PALFVIPWVI VRYLYENTQC
WERNEVKAIW WIIRTPILMT ILINFLIFIR ILGILLSKLR TRQMRCRDYR
LRLARSTLTL VPLLGVHEVV FAPVTEEQAR GALRFAKLGF EIFLSSFQGF
LVSVLYCFIN KEVQSEIRRG WHHCRLRRSL GEEQRQLPER AFRALPSGSG
PGEVPTSRGL SSGTLPGPGN EASRELESYC
and
is encoded by the DNA sequence:
(SEQ ID NO: 3144)
atgaccacca gcccgattct gcagctgctg ctgcgcctga gcctgtgcgg
cctgctgctg cagcgcgcgg aaaccggcag caaaggccag accgcgggcg
aactgtatca gcgctgggaa cgctatcgcc gcgaatgcca ggaaaccctg
gcggcggcgg aaccgccgag cgtggcggcg ggctttgtgc tgcgccagtg
cggcagcgat ggccagtggg gcctgtggcg cgatcatacc cagtgcgaaa
acccggaaaa aaacgaagcg tttctggatc agcgcctgat tctggaacgc
ctgcaggtga tgtataccgt gggctatagc ctgagcctgg cgaccctgct
gctggcgctg ctgattctga gcctgtttcg ccgcctgcat tgcacccgca
actatattca tattaacctg tttaccagct ttatgctgcg cgcggcggcg
attctgagcc gcgatcgcct gctgccgcgc ccgggcccgt atctgggcga
tcaggcgctg gcgctgtgga accaggcgct ggcggcgtgc cgcaccgcgc
agattgtgac ccagtattgc gtgggcgcga actatacctg gctgctggtg
gaaggcgtgt atctgcatag cctgctggtg ctggtgggcg gcagcgaaga
aggccatttt cgctattatc tgctgctggg ctggggcgcg ccggcgctgt
ttgtgattcc gtgggtgatt gtgcgctatc tgtatgaaaa cacccagtgc
tgggaacgca acgaagtgaa agcgatttgg tggattattc gcaccccgat
tctgatgacc attctgatta actttctgat ttttattcgc attctgggca
ttctgctgag caaactgcgc acccgccaga tgcgctgccg cgattatcgc
ctgcgcctgg cgcgcagcac cctgaccctg gtgccgctgc tgggcgtgca
tgaagtggtg tttgcgccgg tgaccgaaga acaggcgcgc ggcgcgctgc
gctttgcgaa actgggcttt gaaatttttc tgagcagctt tcagggcttt
ctggtgagcg tgctgtattg ctttattaac aaagaagtgc agagcgaaat
tcgccgcggc tggcatcatt gccgcctgcg ccgcagcctg ggcgaagaac
agcgccagct gccggaacgc gcgtttegcg cgctgccgag cggcagcggc
ccgggcgaag tgccgaccag ccgcggcctg agcagcggca ccctgccggg
cccgggcaac gaagcgagcc gcgaactgga aagctattgc.
A 493 amino acid isoform of human GIPR, produced by alternative splicing, has the
sequence (Gremlich et al., Diabetes 44:1202-8 (1995); UniProtKB Sequence:
Identifier P48546-2):
(SEQ ID NO: 3145)
MTTSPILQLL LRLSLCGLLL QRAETGSKGQ TAGELYQRWE RYRRECQETL
AAAEPPSGLA CNGSFDMYVC WDYAAPNATA RASCPWYLPW HHHVAAGFVL
RQCGSDGQWG LWRDHTQCEN PEKNEAFLDQ RLILERLQVM YTVGYSLSLA
TLLLALLILS LFRRLHCTRN YIHINLFTSF MLRAAAILSR DRLLPRPGPY
LGDQALALWN QALAACRTAQ IVTQYCVGAN YTWLLVEGVY LHSLLVLVGG
SEEGHFRYYL LLGWGAPALF VIPWVIVRYL YENTQCWERN EVKAIWWIIR
TPILMTILIN FLIFIRILGI LLSKLRTRQM RCRDYRLRLA RSTLTLVPLL
GVHEVVFAPV TEEQARGALR FAKLGFEIFL SSFQGFLVSV LYCFINKEVG
RDPAAAPALW RRRGTAPPLS AIVSQVQSEI RRGWHHCRLR RSLGEEQRQL
PERAFRALPS GSGPGEVPTS RGLSSGTLPG PGNEASRELE SYC
and
is encoded by the DNA sequence:
(SEQ ID NO: 3146)
atgaccacca gcccgattct gcagctgctg ctgcgcctga gcctgtgcgg
cctgctgctg cagcgcgcgg aaaccggcag caaaggccag accgcgggcg
aactgtatca gcgctgggaa cgctatcgcc gcgaatgcca ggaaaccctg
gcggcggcgg aaccgccgag cggcctggcg tgcaacggca gctttgatat
gtatgtgtgc tgggattatg cggcgccgaa cgcgaccgcg cgcgcgagct
gcccgtggta tctgccgtgg catcatcatg tggcggcggg ctttgtgctg
cgccagtgcg gcagcgatgg ccagtggggc ctgtggcgcg atcataccca
gtgcgaaaac ccggaaaaaa acgaagcgtt tctggatcag cgcctgattc
tggaacgcct gcaggtgatg tataccgtgg gctatagcct gagcctggcg
accctgctgc tggcgctgct gattctgagc ctgtttcgcc gcctgcattg
cacccgcaac tatattcata ttaacctgtt taccagcttt atgctgcgcg
cggcggcgat tctgagccgc gatcgcctgc tgccgcgccc gggcccgtat
ctgggcgatc aggcgctggc gctgtggaac caggcgctgg cggcgtgccg
caccgcgcag attgtgaccc agtattgcgt gggcgcgaac tatacctggc
tgctggtgga aggcgtgtat ctgcatagcc tgctggtgct ggtgggcggc
agcgaagaag gccattttcg ctattatctg ctgctgggct ggggcgcgcc
ggcgctgttt gtgattccgt gggtgattgt gcgctatctg tatgaaaaca
cccagtgctg ggaacgcaac gaagtgaaag cgatttggtg gattattcgc
accccgattc tgatgaccat tctgattaac tttctgattt ttattcgcat
tctgggcatt ctgctgagca aactgcgcac ccgccagatg cgctgccgcg
attatcgcct gcgcctggcg cgcagcaccc tgaccctggt gccgctgctg
ggcgtgcatg aagtggtgtt tgcgccggtg accgaagaac aggcgcgcgg
cgcgctgcgc tttgcgaaac tgggctttga aatttttctg agcagctttc
agggctttct ggtgagcgtg ctgtattgct ttattaacaa agaagtgggc
cgcgatccgg cggcggcgcc ggcgctgtgg cgccgccgcg gcaccgcgcc
gccgctgagc gcgattgtga gccaggtgca gagcgaaatt cgccgcggct
ggcatcattg ccgcctgcgc cgcagcctgg gcgaagaaca gcgccagctg
ccggaacgcg cgtttcgcgc gctgccgagc ggcagcggcc cgggcgaagt
gccgaccagc cgcggcctga gcagcggcac cctgccgggc ccgggcaacg
aagcgagccg cgaactggaa agctattgct aa
The 460 amino acid sequence of murine GIPR is (NCBI Reference Sequence: NP_
001074284; uniprotKB/Swiss-Prot QQP543-1); see Vassilatis et al., PNAS USA 2003,
100:4903-4908.
(SEQ ID NO: 3147)
MPLRLLLLLL WLWGLQWAET DSEGQTTTGE LYQRWEHYGQ ECQKMLETTE
PPSGLACNGS FDMYACWNYT AANTTARVSC PWYLPWFRQV SAGFVFRQCG
SDGQWGSWRD HTQCENPEKN GAFQDQTLIL ERLQIMYTVG YSLSLTTLLL
ALLILSLFRR LHCTRNYIHM NLFTSFMLRA AAILTRDQLL PPLGPYTGDQ
APTPWNQALA ACRTAQIMTQ YCVGANYTWL LVEGVYLHHL LVIVGRSEKG
HFRCYLLLGW GAPALFVIPW VIVRYLRENT QCWERNEVKA IWWIIRTPIL
ITILINFLIF IRILGILVSK LRTRQMRCPD YRLRLARSTL TLVPLLGVHE
VVFAPVTEEQ VEGSLRFAKL AFEIFLSSFQ GFLVSVLYCFINKEVQSEIRQ
GWRHRRLRLS LQEQRPRPHQ ELAPRAVPLS SACREAAVGN ALPSGMLHVP
GDEVLESYC
and
is encoded by the DNA sequence (NCBI Reference Sequence: NM_001080815):
(SEQ ID NO: 3148)
atgccgctgc gcctgctgct gctgctgctg tggctgtggg gcctgcagtg
ggcggaaacc gatagcgaag gccagaccac caccggcgaa ctgtatcagc
gctgggaaca ttatggccag gaatgccaga aaatgctgga aaccaccgaa
ccgccgagcg gcctggcgtg caacggcagc tttgatatgt atgcgtgctg
gaactatacc gcggcgaaca ccaccgcgcg cgtgagctgc ccgtggtatc
tgccgtggtt tcgccaggtg agcgcgggct ttgtgtttcg ccagtgcggc
agcgatggcc agtggggcag ctggcgcgat catacccagt gcgaaaaccc
ggaaaaaaac ggcgcgtttc aggatcagac cctgattctg gaacgcctgc
agattatgta taccgtgggc tatagcctga gcctgaccac cctgctgctg
gcgctgctga ttctgagcct gtttcgccgc ctgcattgca cccgcaacta
tattcatatg aacctgttta ccagctttat gctgcgcgcg gcggcgattc
tgacccgcga tcagctgctg ccgccgctgg gcccgtatac cggcgatcag
gcgccgaccc cgtggaacca ggcgctggcg gcgtgccgca ccgcgcagat
tatgacccag tattgcgtgg gcgcgaacta tacctggctg ctggtggaag
gcgtgtatct gcatcatctg ctggtgattg tgggccgcag cgaaaaaggc
cattttcgct gctatctgct gctgggctgg ggcgcgccgg cgctgtttgt
gattccgtgg gtgattgtgc gctatctgcg cgaaaacacc cagtgctggg
aacgcaacga agtgaaagcg atttggtgga ttattcgcac cccgattctg
attaccattc tgattaactt tctgattttt attcgcattc tgggcattct
ggtgagcaaa ctgcgcaccc gccagatgcg ctgcccggat tatcgcctgc
gcctggcgcg cagcaccctg accctggtgc cgctgctggg cgtgcatgaa
gtggtgtttg cgccggtgac cgaagaacag gtggaaggca gcctgcgctt
tgcgaaactg gcgtttgaaa tttttctgag cagctttcag ggctttctgg
tgagcgtgct gtattgcttt attaacaaag aagtgcagag cgaaattcgc
cagggctggc gccatcgccg cctgcgcctg agcctgcagg aacagcgccc
gcgcccgcat caggaactgg cgccgcgcgc ggtgccgctg agcagcgcgt
gccgcgaagc ggcggtgggc aacgcgctgc cgagcggcat gctgcatgtg
ccgggcgatg aagtgctgga aagctattgc taa
A 230 amino acid isoform of murine GIPR, produced by alternative splicing, has
the sequence (Gerhard et al., Genome Res, 14:2121-2127 (2004); NCBI Reference
Sequence: AAI20674):
(SEQ ID NO: 3149)
MPLRLLLLLL WLWGLQWAET DSEGQTTTGE LYQRWEHYGQ ECQKMLETTE
PPSGLACNGS FDMYACWNYT AANTTARVSC PWYLPWFRQV SAGFVFRQCG
SDGQWGSWRD HTQCENPEKN GAFQDQTLIL ERLQIMYTVG YSLSLTTLLL
ALLILSLFRR LHCTRNYIHM NLFTSFMLRA AAILTRDQLL PPLGPYTGDQ
APTPWNQVLH RLLPGGTKTF PIYFRT FPHH
and
is encoded by the DNA sequence:
(SEQ ID NO: 3150)
atgccgctgc gcctgctgct gctgctgctg tggctgtggg gcctgcagtg
ggcggaaacc gatagcgaag gccagaccac caccggcgaa ctgtatcagc
gctgggaaca ttatggccag gaatgccaga aaatgctgga aaccaccgaa
ccgccgagcg gcctggcgtg caacggcagc tttgatatgt atgcgtgctg
gaactatacc gcggcgaaca ccaccgcgcg cgtgagctgc ccgtggtatc
tgccgtggtt tcgccaggtg agcgcgggct ttgtgtttcg ccagtgcggc
agcgatggcc agtggggcag ctggcgcgat catacccagt gcgaaaaccc
ggaaaaaaac ggcgcgtttc aggatcagac cctgattctg gaacgcctgc
agattatgta taccgtgggc tatagcctga gcctgaccac cctgctgctg
gcgctgctga ttctgagcct gtttcgccgc ctgcattgca cccgcaacta
tattcatatg aacctgttta ccagctttat gctgcgcgcg gcggcgattc
tgacccgcga tcagctgctg ccgccgctgg gcccgtatac cggcgatcag
gcgccgaccc cgtggaacca ggtgctgcat cgcctgctgc cgggcggcac
caaaaccttt ccgatttatt ttcgcacctt tccgcatcat taa.

[0155] As stated herein, the term “GIPR polypeptide” encompasses naturally occurring GIPR polypeptide sequences, e.g., human amino acid sequences SEQ ID NOs: 3141, 3143 or 3145. The term “GIPR polypeptide,” however, also encompasses polypeptides comprising an amino acid sequence that differs from the amino acid sequence of a naturally occurring GIPR polypeptide sequence, e.g., SEQ ID NOs: 3141, 3143 or 3145, by one or more amino acids, such that the sequence is at least 85% identical to SEQ ID NOs: 3141, 3143 or 3145. GIPR polypeptides can be generated by introducing one or more amino acid substitutions, either conservative or non-conservative and using naturally or non-naturally occurring amino acids, at particular positions of the GIPR polypeptide.

[0156] A “conservative amino acid substitution” can involve a substitution of a native amino acid residue (i.e., a residue found in a given position of the wild-type GIPR polypeptide sequence) with a nonnative residue (i.e., a residue that is not found in a given position of the wild-type GIPR polypeptide sequence) such that there is little or no effect on the polarity or charge of the amino acid residue at that position. Conservative amino acid substitutions also encompass non-naturally occurring amino acid residues that are typically incorporated by chemical peptide synthesis rather than by synthesis in biological systems. These include peptidomimetics, and other reversed or inverted forms of amino acid moieties.

[0157] Naturally occurring residues can be divided into classes based on common side chain properties:
[0158] (1) hydrophobic: norleucine, Met, Ala, Val, Leu, Ile;
[0159] (2) neutral hydrophilic: Cys, Ser, Thr;
[0160] (3) acidic: Asp, Glu;
[0161] (4) basic: Asn, Gln, His, Lys, Arg;
[0162] (5) residues that influence chain orientation: Gly, Pro; and
[0163] (6) aromatic: Trp, Tyr, Phe.

[0164] Additional groups of amino acids can also be formulated using the principles described in, e.g., Creighton (1984) PROTEINS: STRUCTURE AND MOLECULAR PROPERTIES (2d Ed. 1993), W.H. Freeman and Company. In some instances it can be useful to further characterize substitutions based on two or more of such features (e.g., substitution with a “small polar” residue, such as a Thr residue, can represent a highly conservative substitution in an appropriate context).

[0165] Conservative substitutions can involve the exchange of a member of one of these classes for another member of the same class. Non-conservative substitutions can involve the exchange of a member of one of these classes for a member from another class.

[0166] Synthetic, rare, or modified amino acid residues having known similar physiochemical properties to those of an above-described grouping can be used as a “conservative” substitute for a particular amino acid residue in a sequence. For example, a D-Arg residue may serve as a substitute for a typical L-Arg residue. It also can be the case that a particular substitution can be described in terms of two or more of the above described classes (e.g., a substitution with a small and hydrophobic residue means substituting one amino acid with a residue(s) that is found in both of the above-described classes or other synthetic, rare, or modified residues that are known in the art to have similar physiochemical properties to such residues meeting both definitions).

[0167] Nucleic acid sequences encoding a GIPR polypeptide provided herein, including those degenerate to SEQ ID NOs: 3141, 3143 or 3145, and those encoding polypeptide variants of SEQ ID NOs: 3141, 3143 or 3145 form other aspects of the instant disclosure.

[0168] In order to express the GIPR nucleic acid sequences provided herein, the appropriate coding sequences, e.g., SEQ ID NOs: 3141, 3143 or 3145, can be cloned into a suitable vector and after introduction in a suitable host, the sequence can be expressed to produce the encoded polypeptide according to standard cloning and expression techniques, which are known in the art (e.g., as described in Sambrook, J., Fritsh, E. F., and Maniatis, T. Molecular Cloning: A Laboratory Manual 2nd, ed., Cold Spring Harbor Laboratory, Cold Spring Harbor Laboratory Press, Cold Spring Harbor, N.Y., 1989). The invention also relates to such vectors comprising a nucleic acid sequence according to the invention.

[0169] A “vector” refers to a delivery vehicle that (a) promotes the expression of a polypeptide-encoding nucleic acid sequence; (b) promotes the production of the polypeptide therefrom; (c) promotes the transfection/transformation of target cells therewith; (d) promotes the replication of the nucleic acid sequence; (e) promotes stability of the nucleic acid; (f) promotes detection of the nucleic acid and/or transformed/transfected cells; and/or (g) otherwise imparts advantageous biological and/or physiochemical function to the polypeptide-encoding nucleic acid. A vector can be any suitable vector, including chromosomal, non-chromosomal, and synthetic nucleic acid vectors (a nucleic acid sequence comprising a suitable set of expression control elements). Examples of such vectors include derivatives of SV40, bacterial plasmids, phage DNA, baculovirus, yeast plasmids, vectors derived from combinations of plasmids and phage DNA, and viral nucleic acid (RNA or DNA) vectors.

[0170] A recombinant expression vector can be designed for expression of a GIPR protein in prokaryotic (e.g., E. coli) or eukaryotic cells (e.g., insect cells, using baculovirus expression vectors, yeast cells, or mammalian cells). In one embodiment the host cell is a mammalian, non-human host cell. Representative host cells include those hosts typically used for cloning and expression, including Escherichia coli strains TOP10F′, TOP10, DH10B, DH5a, HB101, W3110, BL21(DE3) and BL21 (DE3)pLysS, BLUESCRIPT (Stratagene), mammalian cell lines CHO, CHO-K1, HEK293, 293-EBNA pIN vectors (Van Heeke & Schuster, J. Biol. Chem. 264: 5503-5509 (1989); pET vectors (Novagen, Madison Wis.). Alternatively, the recombinant expression vector can be transcribed and translated in vitro, for example using T7 promoter regulatory sequences and T7 polymerase and an in vitro translation system. Preferably, the vector contains a promoter upstream of the cloning site containing the nucleic acid sequence encoding the polypeptide. Examples of promoters, which can be switched on and off, include the lac promoter, the T7 promoter, the trc promoter, the tac promoter and the trp promoter.

[0171] Thus, provided herein are vectors comprising a nucleic acid sequence encoding GIPR that facilitate the expression of recombinant GIPR. In various embodiments, the vectors comprise an operably linked nucleotide sequence which regulates the expression of GIPR. A vector can comprise or be associated with any suitable promoter, enhancer, and other expression-facilitating elements. Examples of such elements include strong expression promoters (e.g., a human CMV IE promoter/enhancer, an RSV promoter, SV40 promoter, SL3-3 promoter, MMTV promoter, or HIV LTR promoter, EFIalpha promoter, CAG promoter), effective poly (A) termination sequences, an origin of replication for plasmid product in E. coli, an antibiotic resistance gene as a selectable marker, and/or a convenient cloning site (e.g., a polylinker). Vectors also can comprise an inducible promoter as opposed to a constitutive promoter such as CMV IE. In one aspect, a nucleic acid comprising a sequence encoding a GIPR polypeptide which is operatively linked to a tissue specific promoter which promotes expression of the sequence in a metabolically-relevant tissue, such as liver or pancreatic tissue is provided.

[0172] In another aspect of the instant disclosure, host cells comprising the GIPR nucleic acids and vectors disclosed herein are provided. In various embodiments, the vector or nucleic acid is integrated into the host cell genome, which in other embodiments the vector or nucleic acid is extra-chromosomal.

[0173] Recombinant cells, such as yeast, bacterial (e.g., E. coli), and mammalian cells (e.g., immortalized mammalian cells) comprising such a nucleic acid, vector, or combinations of either or both thereof are provided. In various embodiments cells comprising a non-integrated nucleic acid, such as a plasmid, cosmid, phagemid, or linear expression element, which comprises a sequence coding for expression of a GIPR polypeptide, are provided.

[0174] A vector comprising a nucleic acid sequence encoding a GIPR polypeptide provided herein can be introduced into a host cell by transformation or by transfection. Methods of transforming a cell with an expression vector are well known.

[0175] A GIPR-encoding nucleic acid can be positioned in and/or delivered to a host cell or host animal via a viral vector. Any suitable viral vector can be used in this capacity. A viral vector can comprise any number of viral polynucleotides, alone or in combination with one or more viral proteins, which facilitate delivery, replication, and/or expression of the nucleic acid of the invention in a desired host cell. The viral vector can be a polynucleotide comprising all or part of a viral genome, a viral protein/nucleic acid conjugate, a virus-like particle (VLP), or an intact virus particle comprising viral nucleic acids and a GIPR polypeptide-encoding nucleic acid. A viral particle viral vector can comprise a wild-type viral particle or a modified viral particle. The viral vector can be a vector which requires the presence of another vector or wild-type virus for replication and/or expression (e.g., a viral vector can be a helper-dependent virus), such as an adenoviral vector amplicon. Typically, such viral vectors consist of a wild-type viral particle, or a viral particle modified in its protein and/or nucleic acid content to increase transgene capacity or aid in transfection and/or expression of the nucleic acid (examples of such vectors include the herpes virus/AAV amplicons). Typically, a viral vector is similar to and/or derived from a virus that normally infects humans. Suitable viral vector particles in this respect, include, for example, adenoviral vector particles (including any virus of or derived from a virus of the adenoviridae), adeno-associated viral vector particles (AAV vector particles) or other parvoviruses and parvoviral vector particles, papillomaviral vector particles, flaviviral vectors, alphaviral vectors, herpes viral vectors, pox virus vectors, retroviral vectors, including lentiviral vectors.

[0176] A GIPR polypeptide expressed as described herein can be isolated using standard protein purification methods. A GIPR polypeptide can be isolated from a cell in which is it naturally expressed or it can be isolated from a cell that has been engineered to express GIPR, for example a cell that does not naturally express GIPR.

[0177] Protein purification methods that can be employed to isolate a GIPR polypeptide, as well as associated materials and reagents, are known in the art. Additional purification methods that may be useful for isolating a GIPR polypeptide can be found in references such as Bootcov MR, 1997, Proc. Natl. Acad. Sci. USA 94:11514-9, Fairlie WD, 2000, Gene 254: 67-76.

[0178] Antagonist antigen binding proteins that bind GIPR, including human GIPR (hGIPR) are provided herein. In one embodiment, the human GIPR has the sequence as such as set forth in SEQ ID NO: 3141. In another embodiment, the human GIPR has the sequence as such set forth in SEQ ID NO: 3143. In another embodiment, the human GIPR has the sequence as such set forth in SEQ ID NO: 3145.

[0179] The antigen binding proteins provided are polypeptides into which one or more complementary determining regions (CDRs), as described herein, are embedded and/or joined. In some antigen binding proteins, the CDRs are embedded into a “framework” region, which orients the CDR(s) such that the proper antigen binding properties of the CDR(s) are achieved. Certain antigen binding proteins described herein are antibodies or are derived from antibodies. In other antigen binding proteins, the CDR sequences are embedded in a different type of protein scaffold. The various structures are further described below.

[0180] The antigen binding proteins that are disclosed herein have a variety of utilities. The antigen binding proteins, for instance, are useful in specific binding assays, affinity purification of GIPR, and in screening assays to identify other antagonists of GIPR activity. Other uses for the antigen binding proteins include, for example, diagnosis of GIPR-associated diseases or conditions and screening assays to determine the presence or absence of GIPR. Given that the antigen binding proteins that are provided are antagonists, the GIPR antigen binding proteins have value in therapeutic methods in which it is useful to reduce weight gain, even while maintaining or increasing food intake, increasing % fat mass and increasing % lean mass, improving glucose tolerance, decreasing insulin levels, decreasing cholesterol and triglyceride levels. Accordingly, the antigen binding proteins have utility in the treatment and prevention of diabetes, e.g., type 2 diabetes, obesity, dyslipidemia, elevated glucose levels or elevated insulin levels.

[0181] A variety of selective binding agents useful for modulating the activity of GIPR are provided. These agents include, for instance, antigen binding proteins that contain an antigen binding domain (e.g., scFvs, domain antibodies, and polypeptides with an antigen binding region) and specifically bind to a GIPR polypeptide, in particular human GIPR. Some of the agents, for example, are useful in enhancing the activity of GIPR, and can activate one or more activities associated with GIPR.

[0182] In general the antigen binding proteins that are provided typically comprise one or more CDRs as described herein (e.g., 1, 2, 3, 4, 5 or 6). In some instances, the antigen binding protein comprises (a) a polypeptide structure and (b) one or more CDRs that are inserted into and/or joined to the polypeptide structure. The polypeptide structure can take a variety of different forms. For example, it can be, or comprise, the framework of a naturally occurring antibody, or fragment or variant thereof, or may be completely synthetic in nature. Examples of various polypeptide structures are further described below.

[0183] In certain embodiments, the polypeptide structure of the antigen binding proteins is an antibody or is derived from an antibody. Accordingly, examples of certain antigen binding proteins that are provided include, but are not limited to, monoclonal antibodies, bispecific antibodies, minibodies, domain antibodies such as Nanobodies®, synthetic antibodies (sometimes referred to herein as “antibody mimetics”), chimeric antibodies, humanized antibodies, human antibodies, antibody fusions, and portions or fragments of each, respectively. In some instances, the antigen binding protein is an immunological fragment of a complete antibody (e.g., a Fab, a Fab′, a F(ab′)₂). In other instances the antigen binding protein is a scFv that uses CDRs from an antibody of the present invention.

[0184] The antigen binding proteins as provided herein specifically bind to a human GIPR. In a specific embodiment, the antigen binding protein specifically binds to human GIPR comprising or consisting of the amino acid sequence of SEQ ID NO: 3141. In a specific embodiment, the antigen binding protein specifically binds to human GIPR comprising or consisting of the amino acid sequence of SEQ ID NO: 3143. In a specific embodiment, the antigen binding protein specifically binds to human GIPR comprising or consisting of the amino acid sequence of SEQ ID NO: 3145.

[0185] The antigen binding proteins that are provided are antagonists and typically have one, two, three, four, five, six, seven or all eight of the following characteristics:
[0186] (a) ability to prevent or reduce binding of GIP to GIPR, where the levels can be measured, for example, by the methods such as radioactive- or fluorescence-labeled ligand binding study, or by the methods described herein (e.g. cAMP assay or other functional assays). The decrease can be at least 10, 25, 50, 100% or more relative to the pre-treatment levels of SEQ ID NO: 3141, 3143 or 3145 under comparable conditions.
[0187] (b) ability to decrease blood glucose;
[0188] (c) ability to increase glucose tolerance;
[0189] (d) ability to increase insulin sensitivity;
[0190] (e) ability to decrease body weight or reduce body weight gain;
[0191] (f) ability to decrease fat mass or decrease inflammation in fat tissue;
[0192] (g) ability to decrease fasting insulin levels;
[0193] (h) ability to decrease circulating cholesterol levels;
[0194] (i) ability to decrease circulating triglyceride levels;
[0195] (j) ability to decrease liver steatosis or reduce triglyceride level in liver;
[0196] (k) decrease AST, ALT, and/or ALP levels.

[0197] In one embodiment, a GIPR antigen binding protein has one or more of the following activities:
[0198] (a) binds human GIPR such that KD is ≤200 nM, is ≤150 nM, is 100 nM, is ≤50 nM, is ≤10 nM, is ≤5 nM, is ≤2 nM, or is ≤1 nM, e.g., as measured via a surface plasma resonance or kinetic exclusion assay technique.
[0199] (b) has a half-life in human serum of at least 3 days;

[0200] Some antigen binding proteins that are provided have an on-rate (ka) for GIPR of at least 10⁴/M×seconds, at least 10⁵/M×seconds, or at least 10⁶/M×seconds as measured, for instance, as described below. Certain antigen binding proteins that are provided have a slow dissociation rate or off-rate. Some antigen binding proteins, for instance, have a kd (off-rate) of 1×10⁻² s⁻¹, or 1×10⁻³ s⁻¹, or 1×10⁻⁴ s⁻¹, or 1×10⁻⁵ s⁻¹. In certain embodiments, the antigen binding protein has a KD (equilibrium binding affinity) of less than 25 pM, 50 pM, 100 pM, 500 pM, 1 nM, 5 nM, 10 nM, 25 nM or 50 nM.

[0201] In another aspect, an antigen-binding protein is provided having a half-life of at least one day in vitro or in vivo (e.g., when administered to a human subject). In one embodiment, the antigen binding protein has a half-life of at least three days. In various other embodiments, the antigen binding protein has a half-life of 4, 5, 6, 7, 8, 9, 10, 15, 20, 25, 30, 40, 50, or 60 days or longer. In another embodiment, the antigen binding protein is derivatized or modified such that it has a longer half-life as compared to the underivatized or unmodified antibody. In another embodiment, the antigen binding protein contains point mutations to increase serum half-life. Further details regarding such mutant and derivatized forms are provided below.

[0202] Some of the antigen binding proteins that are provided have the structure typically associated with naturally occurring antibodies. The structural units of these antibodies typically comprise one or more tetramers, each composed of two identical couplets of polypeptide chains, though some species of mammals also produce antibodies having only a single heavy chain. In a typical antibody, each pair or couplet includes one full-length “light” chain (in certain embodiments, about 25 kDa) and one full-length “heavy” chain (in certain embodiments, about 50-70 kDa). Each individual immunoglobulin chain is composed of several “immunoglobulin domains”, each consisting of roughly 90 to 110 amino acids and expressing a characteristic folding pattern. These domains are the basic units of which antibody polypeptides are composed. The amino-terminal portion of each chain typically includes a variable domain that is responsible for antigen recognition. The carboxy-terminal portion is more conserved evolutionarily than the other end of the chain and is referred to as the “constant region” or “C region”. Human light chains generally are classified as kappa and lambda light chains, and each of these contains one variable domain and one constant domain. Heavy chains are typically classified as mu, delta, gamma, alpha, or epsilon chains, and these define the antibody's isotype as IgM, IgD, IgG, IgA, and IgE, respectively. IgG has several subtypes, including, but not limited to, IgG1, IgG2, IgG3, and IgG4. IgM subtypes include IgM, and IgM2. IgA subtypes include IgA1 and IgA2. In humans, the IgA and IgD isotypes contain four heavy chains and four light chains; the IgG and IgE isotypes contain two heavy chains and two light chains; and the IgM isotype contains five heavy chains and five light chains. The heavy chain C region typically comprises one or more domains that may be responsible for effector function. The number of heavy chain constant region domains will depend on the isotype. IgG heavy chains, for example, each contain three C region domains known as CHI, CH2 and CH3. The antibodies that are provided can have any of these isotypes and subtypes. In certain embodiments, the GIPR antibody is of the IgG1, IgG2, or IgG4 subtype. The terms “GIPR antibody” and “anti-GIPR antibody” are used interchangeably throughout this application and figures. Both terms refer to an antibody that binds to GIPR.

[0203] In full-length light and heavy chains, the variable and constant regions are joined by a “J” region of about twelve or more amino acids, with the heavy chain also including a “D” region of about ten more amino acids. See, e.g. Fundamental Immunology, 2nd ed., Ch. 7 (Paul, W., ed.) 1989, New York: Raven Press (hereby incorporated by reference in its entirety for all purposes). The variable regions of each light/heavy chain pair typically form the antigen binding site.

[0204] For the antibodies provided herein, the variable regions of immunoglobulin chains generally exhibit the same overall structure, comprising relatively conserved framework regions (FR) joined by three hypervariable regions, more often called “complementarity determining regions” or CDRs. The CDRs from the two chains of each heavy chain/light chain pair mentioned above typically are aligned by the framework regions to form a structure that binds specifically with a specific epitope on GIPR. From N-terminal to C-terminal, naturally-occurring light and heavy chain variable regions both typically conform with the following order of these elements: FR1, CDR1, FR2, CDR2, FR3, CDR3 and FR4. A numbering system has been devised for assigning numbers to amino acids that occupy positions in each of these domains. This numbering system is defined in Kabat Sequences of Proteins of Immunological Interest (1987 and 1991, NIH, Bethesda, Md.), or Chothia & Lesk, 1987, J. Mol. Biol. 196:901-917; Chothia et al., 1989, Nature 342:878-883.

[0205] The sequence information for specific antibodies prepared and identified as described in the Examples below is summarized in TABLE 1. Thus, in an embodiment, an antigen binding protein is an antibody with the CDR, variable domain and light and heavy chain sequences as specified in one of the rows of TABLE 1.

[0206] SEQ ID NOs have been assigned to variable light chain, variable heavy chain, light chain, heavy chain, CDRL1, CDRL2, CDRL3, CDRH1, CDRH2, and CDRH3 sequences of the antibodies and fragments thereof of the present invention and are shown in TABLE 1. SEQ ID NOs have also been assigned to polynucleotides encoding the variable light chain, variable heavy chain, light chain, heavy chain, CDRL1, CDRL2, CDRL3, CDRH1, CDRH2, and CDRH3 sequences of the antibodies and fragments thereof of the present invention and are shown in TABLE 2. The antigen binding proteins of the present invention can be identified by SEQ ID NO, but also by construct name (e.g., 2C2.005) or identifier number (e.g., iPS:336175). The antigen binding proteins identified in Tables 1-5 below can be grouped into families based on construct name. For example, the “4B1 family” includes the constructs 4B1, 4B1.010, 4B1.011, 4B1.012, 4B1.013, 4B1.014, 4B1.015, and 4B1.016.

[0207] The various light chain and heavy chain variable regions provided herein are depicted in TABLE 3. Each of these variable regions may be attached to a heavy or light chain constant regions to form a complete antibody heavy and light chain, respectively. Furthermore, each of the so generated heavy and light chain sequences may be combined to form a complete antibody structure.

Lengthy table referenced here
US20240261421A1-20240808-T00001
Please refer to the end of the specification for access instructions.

Lengthy table referenced here
US20240261421A1-20240808-T00002
Please refer to the end of the specification for access instructions.

Lengthy table referenced here
US20240261421A1-20240808-T00003
Please refer to the end of the specification for access instructions.

Lengthy table referenced here
US20240261421A1-20240808-T00004
Please refer to the end of the specification for access instructions.

Lengthy table referenced here
US20240261421A1-20240808-T00005
Please refer to the end of the specification for access instructions.

Lengthy table referenced here
US20240261421A1-20240808-T00006
Please refer to the end of the specification for access instructions.

[0208] In one embodiment the antibody or fragment thereof comprises a light chain variable region comprising a sequence selected from the group consisting of SEQ ID NOs: 1-157 and a heavy chain variable region comprising a sequence selected from the group consisting of SEQ ID NOs: 158-314.

[0209] In one embodiment the antibody or fragment thereof comprises a combination of light chain variable region and a heavy chain variable region selected from the group consisting of a light chain variable region comprising SEQ ID NO: 1 and a heavy chain variable region comprising SEQ ID NO: 158; a light chain variable region comprising SEQ ID NO: 2 and a heavy chain variable region comprising SEQ ID NO: 159; a light chain variable region comprising SEQ ID NO: 3 and a heavy chain variable region comprising SEQ ID NO: 160; a light chain variable region comprising SEQ ID NO: 4 and a heavy chain variable region comprising SEQ ID NO: 161; a light chain variable region comprising SEQ ID NO: 5 and a heavy chain variable region comprising SEQ ID NO: 162; a light chain variable region comprising SEQ ID NO: 6 and a heavy chain variable region comprising SEQ ID NO: 163; a light chain variable region comprising SEQ ID NO: 7 and a heavy chain variable region comprising SEQ ID NO: 164; a light chain variable region comprising SEQ ID NO: 8 and a heavy chain variable region comprising SEQ ID NO: 165; a light chain variable region comprising SEQ ID NO: 9 and a heavy chain variable region comprising SEQ ID NO: 166; a light chain variable region comprising SEQ ID NO: 10 and a heavy chain variable region comprising SEQ ID NO: 167; a light chain variable region comprising SEQ ID NO: 11 and a heavy chain variable region comprising SEQ ID NO: 168; a light chain variable region comprising SEQ ID NO: 12 and a heavy chain variable region comprising SEQ ID NO: 169; a light chain variable region comprising SEQ ID NO: 13 and a heavy chain variable region comprising SEQ ID NO: 170; a light chain variable region comprising SEQ ID NO: 14 and a heavy chain variable region comprising SEQ ID NO: 171; a light chain variable region comprising SEQ ID NO: 15 and a heavy chain variable region comprising SEQ ID NO: 172; a light chain variable region comprising SEQ ID NO: 16 and a heavy chain variable region comprising SEQ ID NO: 173; a light chain variable region comprising SEQ ID NO: 17 and a heavy chain variable region comprising SEQ ID NO: 174; a light chain variable region comprising SEQ ID NO: 18 and a heavy chain variable region comprising SEQ ID NO: 175; a light chain variable region comprising SEQ ID NO: 19 and a heavy chain variable region comprising SEQ ID NO: 176; a light chain variable region comprising SEQ ID NO: 20 and a heavy chain variable region comprising SEQ ID NO: 177; a light chain variable region comprising SEQ ID NO: 21 and a heavy chain variable region comprising SEQ ID NO: 178; a light chain variable region comprising SEQ ID NO: 22 and a heavy chain variable region comprising SEQ ID NO: 179; a light chain variable region comprising SEQ ID NO: 23 and a heavy chain variable region comprising SEQ ID NO: 180; a light chain variable region comprising SEQ ID NO: 24 and a heavy chain variable region comprising SEQ ID NO: 181; a light chain variable region comprising SEQ ID NO: 25 and a heavy chain variable region comprising SEQ ID NO: 182; a light chain variable region comprising SEQ ID NO: 26 and a heavy chain variable region comprising SEQ ID NO: 183; a light chain variable region comprising SEQ ID NO: 27 and a heavy chain variable region comprising SEQ ID NO: 184; a light chain variable region comprising SEQ ID NO: 28 and a heavy chain variable region comprising SEQ ID NO: 185; a light chain variable region comprising SEQ ID NO: 29 and a heavy chain variable region comprising SEQ ID NO: 186; a light chain variable region comprising SEQ ID NO: 30 and a heavy chain variable region comprising SEQ ID NO: 187; a light chain variable region comprising SEQ ID NO: 31 and a heavy chain variable region comprising SEQ ID NO: 188; a light chain variable region comprising SEQ ID NO: 32 and a heavy chain variable region comprising SEQ ID NO: 189; a light chain variable region comprising SEQ ID NO: 33 and a heavy chain variable region comprising SEQ ID NO: 190; a light chain variable region comprising SEQ ID NO: 34 and a heavy chain variable region comprising SEQ ID NO: 191; a light chain variable region comprising SEQ ID NO: 35 and a heavy chain variable region comprising SEQ ID NO: 192; a light chain variable region comprising SEQ ID NO: 36 and a heavy chain variable region comprising SEQ ID NO: 193; a light chain variable region comprising SEQ ID NO: 37 and a heavy chain variable region comprising SEQ ID NO: 194; a light chain variable region comprising SEQ ID NO: 38 and a heavy chain variable region comprising SEQ ID NO: 195; a light chain variable region comprising SEQ ID NO: 39 and a heavy chain variable region comprising SEQ ID NO: 196; a light chain variable region comprising SEQ ID NO: 40 and a heavy chain variable region comprising SEQ ID NO: 197; a light chain variable region comprising SEQ ID NO: 41 and a heavy chain variable region comprising SEQ ID NO: 198; a light chain variable region comprising SEQ ID NO: 42 and a heavy chain variable region comprising SEQ ID NO: 199; a light chain variable region comprising SEQ ID NO: 43 and a heavy chain variable region comprising SEQ ID NO: 200; a light chain variable region comprising SEQ ID NO: 44 and a heavy chain variable region comprising SEQ ID NO: 201; a light chain variable region comprising SEQ ID NO: 45 and a heavy chain variable region comprising SEQ ID NO: 202; a light chain variable region comprising SEQ ID NO: 46 and a heavy chain variable region comprising SEQ ID NO: 203; a light chain variable region comprising SEQ ID NO: 47 and a heavy chain variable region comprising SEQ ID NO: 204; a light chain variable region comprising SEQ ID NO: 48 and a heavy chain variable region comprising SEQ ID NO: 205; a light chain variable region comprising SEQ ID NO: 49 and a heavy chain variable region comprising SEQ ID NO: 206; a light chain variable region comprising SEQ ID NO: 50 and a heavy chain variable region comprising SEQ ID NO: 207; a light chain variable region comprising SEQ ID NO: 51 and a heavy chain variable region comprising SEQ ID NO: 208; a light chain variable region comprising SEQ ID NO: 52 and a heavy chain variable region comprising SEQ ID NO: 209; a light chain variable region comprising SEQ ID NO: 53 and a heavy chain variable region comprising SEQ ID NO: 210; a light chain variable region comprising SEQ ID NO: 54 and a heavy chain variable region comprising SEQ ID NO: 211; a light chain variable region comprising SEQ ID NO: 55 and a heavy chain variable region comprising SEQ ID NO: 212; a light chain variable region comprising SEQ ID NO: 56 and a heavy chain variable region comprising SEQ ID NO: 213; a light chain variable region comprising SEQ ID NO: 57 and a heavy chain variable region comprising SEQ ID NO: 214; a light chain variable region comprising SEQ ID NO: 58 and a heavy chain variable region comprising SEQ ID NO: 215; a light chain variable region comprising SEQ ID NO: 59 and a heavy chain variable region comprising SEQ ID NO: 216; a light chain variable region comprising SEQ ID NO: 60 and a heavy chain variable region comprising SEQ ID NO: 217; a light chain variable region comprising SEQ ID NO: 61 and a heavy chain variable region comprising SEQ ID NO: 218; a light chain variable region comprising SEQ ID NO: 62 and a heavy chain variable region comprising SEQ ID NO: 219; a light chain variable region comprising SEQ ID NO: 63 and a heavy chain variable region comprising SEQ ID NO: 220; a light chain variable region comprising SEQ ID NO: 64 and a heavy chain variable region comprising SEQ ID NO: 221; a light chain variable region comprising SEQ ID NO: 65 and a heavy chain variable region comprising SEQ ID NO: 222; a light chain variable region comprising SEQ ID NO: 66 and a heavy chain variable region comprising SEQ ID NO: 223; a light chain variable region comprising SEQ ID NO: 67 and a heavy chain variable region comprising SEQ ID NO: 224; a light chain variable region comprising SEQ ID NO: 68 and a heavy chain variable region comprising SEQ ID NO: 225; a light chain variable region comprising SEQ ID NO: 69 and a heavy chain variable region comprising SEQ ID NO: 226; a light chain variable region comprising SEQ ID NO: 70 and a heavy chain variable region comprising SEQ ID NO: 227; a light chain variable region comprising SEQ ID NO: 71 and a heavy chain variable region comprising SEQ ID NO: 228; a light chain variable region comprising SEQ ID NO: 72 and a heavy chain variable region comprising SEQ ID NO: 229; a light chain variable region comprising SEQ ID NO: 73 and a heavy chain variable region comprising SEQ ID NO: 230; a light chain variable region comprising SEQ ID NO: 74 and a heavy chain variable region comprising SEQ ID NO: 231; a light chain variable region comprising SEQ ID NO: 75 and a heavy chain variable region comprising SEQ ID NO: 232; a light chain variable region comprising SEQ ID NO: 76 and a heavy chain variable region comprising SEQ ID NO: 233; a light chain variable region comprising SEQ ID NO: 77 and a heavy chain variable region comprising SEQ ID NO: 234; a light chain variable region comprising SEQ ID NO: 78 and a heavy chain variable region comprising SEQ ID NO: 235; a light chain variable region comprising SEQ ID NO: 79 and a heavy chain variable region comprising SEQ ID NO: 236; a light chain variable region comprising SEQ ID NO: 80 and a heavy chain variable region comprising SEQ ID NO: 237; a light chain variable region comprising SEQ ID NO: 81 and a heavy chain variable region comprising SEQ ID NO: 238; a light chain variable region comprising SEQ ID NO: 82 and a heavy chain variable region comprising SEQ ID NO: 239; a light chain variable region comprising SEQ ID NO: 83 and a heavy chain variable region comprising SEQ ID NO: 240; a light chain variable region comprising SEQ ID NO: 84 and a heavy chain variable region comprising SEQ ID NO: 241; a light chain variable region comprising SEQ ID NO: 85 and a heavy chain variable region comprising SEQ ID NO: 242; a light chain variable region comprising SEQ ID NO: 86 and a heavy chain variable region comprising SEQ ID NO: 243; a light chain variable region comprising SEQ ID NO: 87 and a heavy chain variable region comprising SEQ ID NO: 244; a light chain variable region comprising SEQ ID NO: 88 and a heavy chain variable region comprising SEQ ID NO: 245; a light chain variable region comprising SEQ ID NO: 89 and a heavy chain variable region comprising SEQ ID NO: 246; a light chain variable region comprising SEQ ID NO: 90 and a heavy chain variable region comprising SEQ ID NO: 247; a light chain variable region comprising SEQ ID NO: 91 and a heavy chain variable region comprising SEQ ID NO: 248; a light chain variable region comprising SEQ ID NO: 92 and a heavy chain variable region comprising SEQ ID NO: 249; a light chain variable region comprising SEQ ID NO: 93 and a heavy chain variable region comprising SEQ ID NO: 250; a light chain variable region comprising SEQ ID NO: 94 and a heavy chain variable region comprising SEQ ID NO: 251; a light chain variable region comprising SEQ ID NO: 95 and a heavy chain variable region comprising SEQ ID NO: 252; a light chain variable region comprising SEQ ID NO: 96 and a heavy chain variable region comprising SEQ ID NO: 253; a light chain variable region comprising SEQ ID NO: 97 and a heavy chain variable region comprising SEQ ID NO: 254; a light chain variable region comprising SEQ ID NO: 98 and a heavy chain variable region comprising SEQ ID NO: 255; a light chain variable region comprising SEQ ID NO: 99 and a heavy chain variable region comprising SEQ ID NO: 256; a light chain variable region comprising SEQ ID NO: 100 and a heavy chain variable region comprising SEQ ID NO: 257; a light chain variable region comprising SEQ ID NO: 101 and a heavy chain variable region comprising SEQ ID NO: 258; a light chain variable region comprising SEQ ID NO: 102 and a heavy chain variable region comprising SEQ ID NO: 259; a light chain variable region comprising SEQ ID NO: 103 and a heavy chain variable region comprising SEQ ID NO: 260; a light chain variable region comprising SEQ ID NO: 104 and a heavy chain variable region comprising SEQ ID NO: 261; a light chain variable region comprising SEQ ID NO: 105 and a heavy chain variable region comprising SEQ ID NO: 262; a light chain variable region comprising SEQ ID NO: 106 and a heavy chain variable region comprising SEQ ID NO: 263; a light chain variable region comprising SEQ ID NO: 107 and a heavy chain variable region comprising SEQ ID NO: 264; a light chain variable region comprising SEQ ID NO: 108 and a heavy chain variable region comprising SEQ ID NO: 265; a light chain variable region comprising SEQ ID NO: 109 and a heavy chain variable region comprising SEQ ID NO: 266; a light chain variable region comprising SEQ ID NO: 110 and a heavy chain variable region comprising SEQ ID NO: 267; a light chain variable region comprising SEQ ID NO: 111 and a heavy chain variable region comprising SEQ ID NO: 268; a light chain variable region comprising SEQ ID NO: 112 and a heavy chain variable region comprising SEQ ID NO: 269; a light chain variable region comprising SEQ ID NO: 113 and a heavy chain variable region comprising SEQ ID NO: 270; a light chain variable region comprising SEQ ID NO: 114 and a heavy chain variable region comprising SEQ ID NO: 271; a light chain variable region comprising SEQ ID NO: 115 and a heavy chain variable region comprising SEQ ID NO: 272; a light chain variable region comprising SEQ ID NO: 116 and a heavy chain variable region comprising SEQ ID NO: 273; a light chain variable region comprising SEQ ID NO: 117 and a heavy chain variable region comprising SEQ ID NO: 274; a light chain variable region comprising SEQ ID NO: 118 and a heavy chain variable region comprising SEQ ID NO: 275; a light chain variable region comprising SEQ ID NO: 119 and a heavy chain variable region comprising SEQ ID NO: 276; a light chain variable region comprising SEQ ID NO: 120 and a heavy chain variable region comprising SEQ ID NO: 277; a light chain variable region comprising SEQ ID NO: 121 and a heavy chain variable region comprising SEQ ID NO: 278; a light chain variable region comprising SEQ ID NO: 122 and a heavy chain variable region comprising SEQ ID NO: 279; a light chain variable region comprising SEQ ID NO: 123 and a heavy chain variable region comprising SEQ ID NO: 280; a light chain variable region comprising SEQ ID NO: 124 and a heavy chain variable region comprising SEQ ID NO: 281; a light chain variable region comprising SEQ ID NO: 125 and a heavy chain variable region comprising SEQ ID NO: 282; a light chain variable region comprising SEQ ID NO: 126 and a heavy chain variable region comprising SEQ ID NO: 283; a light chain variable region comprising SEQ ID NO: 127 and a heavy chain variable region comprising SEQ ID NO: 284; a light chain variable region comprising SEQ ID NO: 128 and a heavy chain variable region comprising SEQ ID NO: 285; a light chain variable region comprising SEQ ID NO: 129 and a heavy chain variable region comprising SEQ ID NO: 286; a light chain variable region comprising SEQ ID NO: 130 and a heavy chain variable region comprising SEQ ID NO: 287; a light chain variable region comprising SEQ ID NO: 131 and a heavy chain variable region comprising SEQ ID NO: 288; a light chain variable region comprising SEQ ID NO: 132 and a heavy chain variable region comprising SEQ ID NO: 289; a light chain variable region comprising SEQ ID NO: 133 and a heavy chain variable region comprising SEQ ID NO: 290; a light chain variable region comprising SEQ ID NO: 134 and a heavy chain variable region comprising SEQ ID NO: 291; a light chain variable region comprising SEQ ID NO: 135 and a heavy chain variable region comprising SEQ ID NO: 292; a light chain variable region comprising SEQ ID NO: 136 and a heavy chain variable region comprising SEQ ID NO: 293; a light chain variable region comprising SEQ ID NO: 137 and a heavy chain variable region comprising SEQ ID NO: 294; a light chain variable region comprising SEQ ID NO: 138 and a heavy chain variable region comprising SEQ ID NO: 295; a light chain variable region comprising SEQ ID NO: 139 and a heavy chain variable region comprising SEQ ID NO: 296; a light chain variable region comprising SEQ ID NO: 140 and a heavy chain variable region comprising SEQ ID NO: 297; a light chain variable region comprising SEQ ID NO: 141 and a heavy chain variable region comprising SEQ ID NO: 298; a light chain variable region comprising SEQ ID NO: 142 and a heavy chain variable region comprising SEQ ID NO: 299; a light chain variable region comprising SEQ ID NO: 143 and a heavy chain variable region comprising SEQ ID NO: 300; a light chain variable region comprising SEQ ID NO: 144 and a heavy chain variable region comprising SEQ ID NO: 301; a light chain variable region comprising SEQ ID NO: 145 and a heavy chain variable region comprising SEQ ID NO: 302; a light chain variable region comprising SEQ ID NO: 146 and a heavy chain variable region comprising SEQ ID NO: 303; a light chain variable region comprising SEQ ID NO: 147 and a heavy chain variable region comprising SEQ ID NO: 304; a light chain variable region comprising SEQ ID NO: 148 and a heavy chain variable region comprising SEQ ID NO: 305; a light chain variable region comprising SEQ ID NO: 149 and a heavy chain variable region comprising SEQ ID NO: 306; a light chain variable region comprising SEQ ID NO: 150 and a heavy chain variable region comprising SEQ ID NO: 307; a light chain variable region comprising SEQ ID NO: 151 and a heavy chain variable region comprising SEQ ID NO: 308; a light chain variable region comprising SEQ ID NO: 152 and a heavy chain variable region comprising SEQ ID NO: 309; a light chain variable region comprising SEQ ID NO: 153 and a heavy chain variable region comprising SEQ ID NO: 310; a light chain variable region comprising SEQ ID NO: 154 and a heavy chain variable region comprising SEQ ID NO: 311; a light chain variable region comprising SEQ ID NO: 155 and a heavy chain variable region comprising SEQ ID NO: 312; a light chain variable region comprising SEQ ID NO: 156 and a heavy chain variable region comprising SEQ ID NO: 313; and a light chain variable region comprising SEQ ID NO: 157 and a heavy chain variable region comprising SEQ ID NO: 314.

[0210] In one embodiment the antibody or fragment thereof comprises a light chain variable region encoded by a polynucleotide sequence selected from the group consisting of SEQ ID NOs: 1571-1727 and a heavy chain variable region encoded by a polynucleotide sequence selected from the group consisting of SEQ ID NOs: 1728-1884.

[0211] In one embodiment the antibody or fragment thereof comprises a combination of light chain variable region and a heavy chain variable region selected from the group consisting of a light chain variable region encoded by a polynucleotide sequence comprising SEQ ID NO: 1571 and a heavy chain variable region encoded by a polynucleotide sequence comprising SEQ ID NO: 1728; a light chain variable region encoded by a polynucleotide sequence comprising SEQ ID NO: 1572 and a heavy chain variable region encoded by a polynucleotide sequence comprising SEQ ID NO: 1729; a light chain variable region encoded by a polynucleotide sequence comprising SEQ ID NO: 1573 and a heavy chain variable region encoded by a polynucleotide sequence comprising SEQ ID NO: 1730; a light chain variable region encoded by a polynucleotide sequence comprising SEQ ID NO: 1574 and a heavy chain variable region encoded by a polynucleotide sequence comprising SEQ ID NO: 1731; a light chain variable region encoded by a polynucleotide sequence comprising SEQ ID NO: 1575 and a heavy chain variable region encoded by a polynucleotide sequence comprising SEQ ID NO: 1732; a light chain variable region encoded by a polynucleotide sequence comprising SEQ ID NO: 1576 and a heavy chain variable region encoded by a polynucleotide sequence comprising SEQ ID NO: 1733; a light chain variable region encoded by a polynucleotide sequence comprising SEQ ID NO: 1577 and a heavy chain variable region encoded by a polynucleotide sequence comprising SEQ ID NO: 1734; a light chain variable region encoded by a polynucleotide sequence comprising SEQ ID NO: 1578 and a heavy chain variable region encoded by a polynucleotide sequence comprising SEQ ID NO: 1735; a light chain variable region encoded by a polynucleotide sequence comprising SEQ ID NO: 1579 and a heavy chain variable region encoded by a polynucleotide sequence comprising SEQ ID NO: 1736; a light chain variable region encoded by a polynucleotide sequence comprising SEQ ID NO: 1580 and a heavy chain variable region encoded by a polynucleotide sequence comprising SEQ ID NO: 1737; a light chain variable region encoded by a polynucleotide sequence comprising SEQ ID NO: 1581 and a heavy chain variable region encoded by a polynucleotide sequence comprising SEQ ID NO: 1738; a light chain variable region encoded by a polynucleotide sequence comprising SEQ ID NO: 1582 and a heavy chain variable region encoded by a polynucleotide sequence comprising SEQ ID NO: 1739; a light chain variable region encoded by a polynucleotide sequence comprising SEQ ID NO: 1583 and a heavy chain variable region encoded by a polynucleotide sequence comprising SEQ ID NO: 1740; a light chain variable region encoded by a polynucleotide sequence comprising SEQ ID NO: 1584 and a heavy chain variable region encoded by a polynucleotide sequence comprising SEQ ID NO: 1741; a light chain variable region encoded by a polynucleotide sequence comprising SEQ ID NO: 1585 and a heavy chain variable region encoded by a polynucleotide sequence comprising SEQ ID NO: 1742; a light chain variable region encoded by a polynucleotide sequence comprising SEQ ID NO: 1586 and a heavy chain variable region encoded by a polynucleotide sequence comprising SEQ ID NO: 1743; a light chain variable region encoded by a polynucleotide sequence comprising SEQ ID NO: 1587 and a heavy chain variable region encoded by a polynucleotide sequence comprising SEQ ID NO: 1744; a light chain variable region encoded by a polynucleotide sequence comprising SEQ ID NO: 1588 and a heavy chain variable region encoded by a polynucleotide sequence comprising SEQ ID NO: 1745; a light chain variable region encoded by a polynucleotide sequence comprising SEQ ID NO: 1589 and a heavy chain variable region encoded by a polynucleotide sequence comprising SEQ ID NO: 1746; a light chain variable region encoded by a polynucleotide sequence comprising SEQ ID NO: 1590 and a heavy chain variable region encoded by a polynucleotide sequence comprising SEQ ID NO: 1747; a light chain variable region encoded by a polynucleotide sequence comprising SEQ ID NO: 1591 and a heavy chain variable region encoded by a polynucleotide sequence comprising SEQ ID NO: 1748; a light chain variable region encoded by a polynucleotide sequence comprising SEQ ID NO: 1592 and a heavy chain variable region encoded by a polynucleotide sequence comprising SEQ ID NO: 1749; a light chain variable region encoded by a polynucleotide sequence comprising SEQ ID NO: 1593 and a heavy chain variable region encoded by a polynucleotide sequence comprising SEQ ID NO: 1750; a light chain variable region encoded by a polynucleotide sequence comprising SEQ ID NO: 1594 and a heavy chain variable region encoded by a polynucleotide sequence comprising SEQ ID NO: 1751; a light chain variable region encoded by a polynucleotide sequence comprising SEQ ID NO: 1595 and a heavy chain variable region encoded by a polynucleotide sequence comprising SEQ ID NO: 1752; a light chain variable region encoded by a polynucleotide sequence comprising SEQ ID NO: 1596 and a heavy chain variable region encoded by a polynucleotide sequence comprising SEQ ID NO: 1753; a light chain variable region encoded by a polynucleotide sequence comprising SEQ ID NO: 1597 and a heavy chain variable region encoded by a polynucleotide sequence comprising SEQ ID NO: 1754; a light chain variable region encoded by a polynucleotide sequence comprising SEQ ID NO: 1598 and a heavy chain variable region encoded by a polynucleotide sequence comprising SEQ ID NO: 1755; a light chain variable region encoded by a polynucleotide sequence comprising SEQ ID NO: 1599 and a heavy chain variable region encoded by a polynucleotide sequence comprising SEQ ID NO: 1756; a light chain variable region encoded by a polynucleotide sequence comprising SEQ ID NO: 1600 and a heavy chain variable region encoded by a polynucleotide sequence comprising SEQ ID NO: 1757; a light chain variable region encoded by a polynucleotide sequence comprising SEQ ID NO: 1601 and a heavy chain variable region encoded by a polynucleotide sequence comprising SEQ ID NO: 1758; a light chain variable region encoded by a polynucleotide sequence comprising SEQ ID NO: 1602 and a heavy chain variable region encoded by a polynucleotide sequence comprising SEQ ID NO: 1759; a light chain variable region encoded by a polynucleotide sequence comprising SEQ ID NO: 1603 and a heavy chain variable region encoded by a polynucleotide sequence comprising SEQ ID NO: 1760; a light chain variable region encoded by a polynucleotide sequence comprising SEQ ID NO: 1604 and a heavy chain variable region encoded by a polynucleotide sequence comprising SEQ ID NO: 1761; a light chain variable region encoded by a polynucleotide sequence comprising SEQ ID NO: 1605 and a heavy chain variable region encoded by a polynucleotide sequence comprising SEQ ID NO: 1762; a light chain variable region encoded by a polynucleotide sequence comprising SEQ ID NO: 1606 and a heavy chain variable region encoded by a polynucleotide sequence comprising SEQ ID NO: 1763; a light chain variable region encoded by a polynucleotide sequence comprising SEQ ID NO: 1607 and a heavy chain variable region encoded by a polynucleotide sequence comprising SEQ ID NO: 1764; a light chain variable region encoded by a polynucleotide sequence comprising SEQ ID NO: 1608 and a heavy chain variable region encoded by a polynucleotide sequence comprising SEQ ID NO: 1765; a light chain variable region encoded by a polynucleotide sequence comprising SEQ ID NO: 1609 and a heavy chain variable region encoded by a polynucleotide sequence comprising SEQ ID NO: 1766; a light chain variable region encoded by a polynucleotide sequence comprising SEQ ID NO: 1610 and a heavy chain variable region encoded by a polynucleotide sequence comprising SEQ ID NO: 1767; a light chain variable region encoded by a polynucleotide sequence comprising SEQ ID NO: 1611 and a heavy chain variable region encoded by a polynucleotide sequence comprising SEQ ID NO: 1768; a light chain variable region encoded by a polynucleotide sequence comprising SEQ ID NO: 1612 and a heavy chain variable region encoded by a polynucleotide sequence comprising SEQ ID NO: 1769; a light chain variable region encoded by a polynucleotide sequence comprising SEQ ID NO: 1613 and a heavy chain variable region encoded by a polynucleotide sequence comprising SEQ ID NO: 1770; a light chain variable region encoded by a polynucleotide sequence comprising SEQ ID NO: 1614 and a heavy chain variable region encoded by a polynucleotide sequence comprising SEQ ID NO: 1771; a light chain variable region encoded by a polynucleotide sequence comprising SEQ ID NO: 1615 and a heavy chain variable region encoded by a polynucleotide sequence comprising SEQ ID NO: 1772; a light chain variable region encoded by a polynucleotide sequence comprising SEQ ID NO: 1616 and a heavy chain variable region encoded by a polynucleotide sequence comprising SEQ ID NO: 1773; a light chain variable region encoded by a polynucleotide sequence comprising SEQ ID NO: 1617 and a heavy chain variable region encoded by a polynucleotide sequence comprising SEQ ID NO: 1774; a light chain variable region encoded by a polynucleotide sequence comprising SEQ ID NO: 1618 and a heavy chain variable region encoded by a polynucleotide sequence comprising SEQ ID NO: 1775; a light chain variable region encoded by a polynucleotide sequence comprising SEQ ID NO: 1619 and a heavy chain variable region encoded by a polynucleotide sequence comprising SEQ ID NO: 1776; a light chain variable region encoded by a polynucleotide sequence comprising SEQ ID NO: 1620 and a heavy chain variable region encoded by a polynucleotide sequence comprising SEQ ID NO: 1777; a light chain variable region encoded by a polynucleotide sequence comprising SEQ ID NO: 1621 and a heavy chain variable region encoded by a polynucleotide sequence comprising SEQ ID NO: 1778; a light chain variable region encoded by a polynucleotide sequence comprising SEQ ID NO: 1622 and a heavy chain variable region encoded by a polynucleotide sequence comprising SEQ ID NO: 1779; a light chain variable region encoded by a polynucleotide sequence comprising SEQ ID NO: 1623 and a heavy chain variable region encoded by a polynucleotide sequence comprising SEQ ID NO: 1780; a light chain variable region encoded by a polynucleotide sequence comprising SEQ ID NO: 1624 and a heavy chain variable region encoded by a polynucleotide sequence comprising SEQ ID NO: 1781; a light chain variable region encoded by a polynucleotide sequence comprising SEQ ID NO: 1625 and a heavy chain variable region encoded by a polynucleotide sequence comprising SEQ ID NO: 1782; a light chain variable region encoded by a polynucleotide sequence comprising SEQ ID NO: 1626 and a heavy chain variable region encoded by a polynucleotide sequence comprising SEQ ID NO: 1783; a light chain variable region encoded by a polynucleotide sequence comprising SEQ ID NO: 1627 and a heavy chain variable region encoded by a polynucleotide sequence comprising SEQ ID NO: 1784; a light chain variable region encoded by a polynucleotide sequence comprising SEQ ID NO: 1628 and a heavy chain variable region encoded by a polynucleotide sequence comprising SEQ ID NO: 1785; a light chain variable region encoded by a polynucleotide sequence comprising SEQ ID NO: 1629 and a heavy chain variable region encoded by a polynucleotide sequence comprising SEQ ID NO: 1786; a light chain variable region encoded by a polynucleotide sequence comprising SEQ ID NO: 1630 and a heavy chain variable region encoded by a polynucleotide sequence comprising SEQ ID NO: 1787; a light chain variable region encoded by a polynucleotide sequence comprising SEQ ID NO: 1631 and a heavy chain variable region encoded by a polynucleotide sequence comprising SEQ ID NO: 1788; a light chain variable region encoded by a polynucleotide sequence comprising SEQ ID NO: 1632 and a heavy chain variable region encoded by a polynucleotide sequence comprising SEQ ID NO: 1789; a light chain variable region encoded by a polynucleotide sequence comprising SEQ ID NO: 1633 and a heavy chain variable region encoded by a polynucleotide sequence comprising SEQ ID NO: 1790; a light chain variable region encoded by a polynucleotide sequence comprising SEQ ID NO: 1634 and a heavy chain variable region encoded by a polynucleotide sequence comprising SEQ ID NO: 1791; a light chain variable region encoded by a polynucleotide sequence comprising SEQ ID NO: 1635 and a heavy chain variable region encoded by a polynucleotide sequence comprising SEQ ID NO: 1792; a light chain variable region encoded by a polynucleotide sequence comprising SEQ ID NO: 1636 and a heavy chain variable region encoded by a polynucleotide sequence comprising SEQ ID NO: 1793; a light chain variable region encoded by a polynucleotide sequence comprising SEQ ID NO: 1637 and a heavy chain variable region encoded by a polynucleotide sequence comprising SEQ ID NO: 1794; a light chain variable region encoded by a polynucleotide sequence comprising SEQ ID NO: 1638 and a heavy chain variable region encoded by a polynucleotide sequence comprising SEQ ID NO: 1795; a light chain variable region encoded by a polynucleotide sequence comprising SEQ ID NO: 1639 and a heavy chain variable region encoded by a polynucleotide sequence comprising SEQ ID NO: 1796; a light chain variable region encoded by a polynucleotide sequence comprising SEQ ID NO: 1640 and a heavy chain variable region encoded by a polynucleotide sequence comprising SEQ ID NO: 1797; a light chain variable region encoded by a polynucleotide sequence comprising SEQ ID NO: 1641 and a heavy chain variable region encoded by a polynucleotide sequence comprising SEQ ID NO: 1798; a light chain variable region encoded by a polynucleotide sequence comprising SEQ ID NO: 1642 and a heavy chain variable region encoded by a polynucleotide sequence comprising SEQ ID NO: 1799; a light chain variable region encoded by a polynucleotide sequence comprising SEQ ID NO: 1643 and a heavy chain variable region encoded by a polynucleotide sequence comprising SEQ ID NO: 1800; a light chain variable region encoded by a polynucleotide sequence comprising SEQ ID NO: 1644 and a heavy chain variable region encoded by a polynucleotide sequence comprising SEQ ID NO: 1801; a light chain variable region encoded by a polynucleotide sequence comprising SEQ ID NO: 1645 and a heavy chain variable region encoded by a polynucleotide sequence comprising SEQ ID NO: 1802; a light chain variable region encoded by a polynucleotide sequence comprising SEQ ID NO: 1646 and a heavy chain variable region encoded by a polynucleotide sequence comprising SEQ ID NO: 1803; a light chain variable region encoded by a polynucleotide sequence comprising SEQ ID NO: 1647 and a heavy chain variable region encoded by a polynucleotide sequence comprising SEQ ID NO: 1804; a light chain variable region encoded by a polynucleotide sequence comprising SEQ ID NO: 1648 and a heavy chain variable region encoded by a polynucleotide sequence comprising SEQ ID NO: 1805; a light chain variable region encoded by a polynucleotide sequence comprising SEQ ID NO: 1649 and a heavy chain variable region encoded by a polynucleotide sequence comprising SEQ ID NO: 1806; a light chain variable region encoded by a polynucleotide sequence comprising SEQ ID NO: 1650 and a heavy chain variable region encoded by a polynucleotide sequence comprising SEQ ID NO: 1807; a light chain variable region encoded by a polynucleotide sequence comprising SEQ ID NO: 1651 and a heavy chain variable region encoded by a polynucleotide sequence comprising SEQ ID NO: 1808; a light chain variable region encoded by a polynucleotide sequence comprising SEQ ID NO: 1652 and a heavy chain variable region encoded by a polynucleotide sequence comprising SEQ ID NO: 1809; a light chain variable region encoded by a polynucleotide sequence comprising SEQ ID NO: 1653 and a heavy chain variable region encoded by a polynucleotide sequence comprising SEQ ID NO: 1810; a light chain variable region encoded by a polynucleotide sequence comprising SEQ ID NO: 1654 and a heavy chain variable region encoded by a polynucleotide sequence comprising SEQ ID NO: 1811; a light chain variable region encoded by a polynucleotide sequence comprising SEQ ID NO: 1655 and a heavy chain variable region encoded by a polynucleotide sequence comprising SEQ ID NO: 1812; a light chain variable region encoded by a polynucleotide sequence comprising SEQ ID NO: 1656 and a heavy chain variable region encoded by a polynucleotide sequence comprising SEQ ID NO: 1813; a light chain variable region encoded by a polynucleotide sequence comprising SEQ ID NO: 1657 and a heavy chain variable region encoded by a polynucleotide sequence comprising SEQ ID NO: 1814; a light chain variable region encoded by a polynucleotide sequence comprising SEQ ID NO: 1658 and a heavy chain variable region encoded by a polynucleotide sequence comprising SEQ ID NO: 1815; a light chain variable region encoded by a polynucleotide sequence comprising SEQ ID NO: 1659 and a heavy chain variable region encoded by a polynucleotide sequence comprising SEQ ID NO: 1816; a light chain variable region encoded by a polynucleotide sequence comprising SEQ ID NO: 1660 and a heavy chain variable region encoded by a polynucleotide sequence comprising SEQ ID NO: 1817; a light chain variable region encoded by a polynucleotide sequence comprising SEQ ID NO: 1661 and a heavy chain variable region encoded by a polynucleotide sequence comprising SEQ ID NO: 1818; a light chain variable region encoded by a polynucleotide sequence comprising SEQ ID NO: 1662 and a heavy chain variable region encoded by a polynucleotide sequence comprising SEQ ID NO: 1819; a light chain variable region encoded by a polynucleotide sequence comprising SEQ ID NO: 1663 and a heavy chain variable region encoded by a polynucleotide sequence comprising SEQ ID NO: 1820; a light chain variable region encoded by a polynucleotide sequence comprising SEQ ID NO: 1664 and a heavy chain variable region encoded by a polynucleotide sequence comprising SEQ ID NO: 1821; a light chain variable region encoded by a polynucleotide sequence comprising SEQ ID NO: 1665 and a heavy chain variable region encoded by a polynucleotide sequence comprising SEQ ID NO: 1822; a light chain variable region encoded by a polynucleotide sequence comprising SEQ ID NO: 1666 and a heavy chain variable region encoded by a polynucleotide sequence comprising SEQ ID NO: 1823; a light chain variable region encoded by a polynucleotide sequence comprising SEQ ID NO: 1667 and a heavy chain variable region encoded by a polynucleotide sequence comprising SEQ ID NO: 1824; a light chain variable region encoded by a polynucleotide sequence comprising SEQ ID NO: 1668 and a heavy chain variable region encoded by a polynucleotide sequence comprising SEQ ID NO: 1825; a light chain variable region encoded by a polynucleotide sequence comprising SEQ ID NO: 1669 and a heavy chain variable region encoded by a polynucleotide sequence comprising SEQ ID NO: 1826; a light chain variable region encoded by a polynucleotide sequence comprising SEQ ID NO: 1670 and a heavy chain variable region encoded by a polynucleotide sequence comprising SEQ ID NO: 1827; a light chain variable region encoded by a polynucleotide sequence comprising SEQ ID NO: 1671 and a heavy chain variable region encoded by a polynucleotide sequence comprising SEQ ID NO: 1828; a light chain variable region encoded by a polynucleotide sequence comprising SEQ ID NO: 1672 and a heavy chain variable region encoded by a polynucleotide sequence comprising SEQ ID NO: 1829; a light chain variable region encoded by a polynucleotide sequence comprising SEQ ID NO: 1673 and a heavy chain variable region encoded by a polynucleotide sequence comprising SEQ ID NO: 1830; a light chain variable region encoded by a polynucleotide sequence comprising SEQ ID NO: 1674 and a heavy chain variable region encoded by a polynucleotide sequence comprising SEQ ID NO: 1831; a light chain variable region encoded by a polynucleotide sequence comprising SEQ ID NO: 1675 and a heavy chain variable region encoded by a polynucleotide sequence comprising SEQ ID NO: 1832; a light chain variable region encoded by a polynucleotide sequence comprising SEQ ID NO: 1676 and a heavy chain variable region encoded by a polynucleotide sequence comprising SEQ ID NO: 1833; a light chain variable region encoded by a polynucleotide sequence comprising SEQ ID NO: 1677 and a heavy chain variable region encoded by a polynucleotide sequence comprising SEQ ID NO: 1834; a light chain variable region encoded by a polynucleotide sequence comprising SEQ ID NO: 1678 and a heavy chain variable region encoded by a polynucleotide sequence comprising SEQ ID NO: 1835; a light chain variable region encoded by a polynucleotide sequence comprising SEQ ID NO: 1679 and a heavy chain variable region encoded by a polynucleotide sequence comprising SEQ ID NO: 1836; a light chain variable region encoded by a polynucleotide sequence comprising SEQ ID NO: 1680 and a heavy chain variable region encoded by a polynucleotide sequence comprising SEQ ID NO: 1837; a light chain variable region encoded by a polynucleotide sequence comprising SEQ ID NO: 1681 and a heavy chain variable region encoded by a polynucleotide sequence comprising SEQ ID NO: 1838; a light chain variable region encoded by a polynucleotide sequence comprising SEQ ID NO: 1682 and a heavy chain variable region encoded by a polynucleotide sequence comprising SEQ ID NO: 1839; a light chain variable region encoded by a polynucleotide sequence comprising SEQ ID NO: 1683 and a heavy chain variable region encoded by a polynucleotide sequence comprising SEQ ID NO: 1840; a light chain variable region encoded by a polynucleotide sequence comprising SEQ ID NO: 1684 and a heavy chain variable region encoded by a polynucleotide sequence comprising SEQ ID NO: 1841; a light chain variable region encoded by a polynucleotide sequence comprising SEQ ID NO: 1685 and a heavy chain variable region encoded by a polynucleotide sequence comprising SEQ ID NO: 1842; a light chain variable region encoded by a polynucleotide sequence comprising SEQ ID NO: 1686 and a heavy chain variable region encoded by a polynucleotide sequence comprising SEQ ID NO: 1843; a light chain variable region encoded by a polynucleotide sequence comprising SEQ ID NO: 1687 and a heavy chain variable region encoded by a polynucleotide sequence comprising SEQ ID NO: 1844; a light chain variable region encoded by a polynucleotide sequence comprising SEQ ID NO: 1688 and a heavy chain variable region encoded by a polynucleotide sequence comprising SEQ ID NO: 1845; a light chain variable region encoded by a polynucleotide sequence comprising SEQ ID NO: 1689 and a heavy chain variable region encoded by a polynucleotide sequence comprising SEQ ID NO: 1846; a light chain variable region encoded by a polynucleotide sequence comprising SEQ ID NO: 1690 and a heavy chain variable region encoded by a polynucleotide sequence comprising SEQ ID NO: 1847; a light chain variable region encoded by a polynucleotide sequence comprising SEQ ID NO: 1691 and a heavy chain variable region encoded by a polynucleotide sequence comprising SEQ ID NO: 1848; a light chain variable region encoded by a polynucleotide sequence comprising SEQ ID NO: 1692 and a heavy chain variable region encoded by a polynucleotide sequence comprising SEQ ID NO: 1849; a light chain variable region encoded by a polynucleotide sequence comprising SEQ ID NO: 1693 and a heavy chain variable region encoded by a polynucleotide sequence comprising SEQ ID NO: 1850; a light chain variable region encoded by a polynucleotide sequence comprising SEQ ID NO: 1694 and a heavy chain variable region encoded by a polynucleotide sequence comprising SEQ ID NO: 1851; a light chain variable region encoded by a polynucleotide sequence comprising SEQ ID NO: 1695 and a heavy chain variable region encoded by a polynucleotide sequence comprising SEQ ID NO: 1852; a light chain variable region encoded by a polynucleotide sequence comprising SEQ ID NO: 1696 and a heavy chain variable region encoded by a polynucleotide sequence comprising SEQ ID NO: 1853; a light chain variable region encoded by a polynucleotide sequence comprising SEQ ID NO: 1697 and a heavy chain variable region encoded by a polynucleotide sequence comprising SEQ ID NO: 1854; a light chain variable region encoded by a polynucleotide sequence comprising SEQ ID NO: 1698 and a heavy chain variable region encoded by a polynucleotide sequence comprising SEQ ID NO: 1855; a light chain variable region encoded by a polynucleotide sequence comprising SEQ ID NO: 1699 and a heavy chain variable region encoded by a polynucleotide sequence comprising SEQ ID NO: 1856; a light chain variable region encoded by a polynucleotide sequence comprising SEQ ID NO: 1700 and a heavy chain variable region encoded by a polynucleotide sequence comprising SEQ ID NO: 1857; a light chain variable region encoded by a polynucleotide sequence comprising SEQ ID NO: 1701 and a heavy chain variable region encoded by a polynucleotide sequence comprising SEQ ID NO: 1858; a light chain variable region encoded by a polynucleotide sequence comprising SEQ ID NO: 1702 and a heavy chain variable region encoded by a polynucleotide sequence comprising SEQ ID NO: 1859; a light chain variable region encoded by a polynucleotide sequence comprising SEQ ID NO: 1703 and a heavy chain variable region encoded by a polynucleotide sequence comprising SEQ ID NO: 1860; a light chain variable region encoded by a polynucleotide sequence comprising SEQ ID NO: 1704 and a heavy chain variable region encoded by a polynucleotide sequence comprising SEQ ID NO: 1861; a light chain variable region encoded by a polynucleotide sequence comprising SEQ ID NO: 1705 and a heavy chain variable region encoded by a polynucleotide sequence comprising SEQ ID NO: 1862; a light chain variable region encoded by a polynucleotide sequence comprising SEQ ID NO: 1706 and a heavy chain variable region encoded by a polynucleotide sequence comprising SEQ ID NO: 1863; a light chain variable region encoded by a polynucleotide sequence comprising SEQ ID NO: 1707 and a heavy chain variable region encoded by a polynucleotide sequence comprising SEQ ID NO: 1864; a light chain variable region encoded by a polynucleotide sequence comprising SEQ ID NO: 1708 and a heavy chain variable region encoded by a polynucleotide sequence comprising SEQ ID NO: 1865; a light chain variable region encoded by a polynucleotide sequence comprising SEQ ID NO: 1709 and a heavy chain variable region encoded by a polynucleotide sequence comprising SEQ ID NO: 1866; a light chain variable region encoded by a polynucleotide sequence comprising SEQ ID NO: 1710 and a heavy chain variable region encoded by a polynucleotide sequence comprising SEQ ID NO: 1867; a light chain variable region encoded by a polynucleotide sequence comprising SEQ ID NO: 1711 and a heavy chain variable region encoded by a polynucleotide sequence comprising SEQ ID NO: 1868; a light chain variable region encoded by a polynucleotide sequence comprising SEQ ID NO: 1712 and a heavy chain variable region encoded by a polynucleotide sequence comprising SEQ ID NO: 1869; a light chain variable region encoded by a polynucleotide sequence comprising SEQ ID NO: 1713 and a heavy chain variable region encoded by a polynucleotide sequence comprising SEQ ID NO: 1870; a light chain variable region encoded by a polynucleotide sequence comprising SEQ ID NO: 1714 and a heavy chain variable region encoded by a polynucleotide sequence comprising SEQ ID NO: 1871; a light chain variable region encoded by a polynucleotide sequence comprising SEQ ID NO: 1715 and a heavy chain variable region encoded by a polynucleotide sequence comprising SEQ ID NO: 1872; a light chain variable region encoded by a polynucleotide sequence comprising SEQ ID NO: 1716 and a heavy chain variable region encoded by a polynucleotide sequence comprising SEQ ID NO: 1873; a light chain variable region encoded by a polynucleotide sequence comprising SEQ ID NO: 1717 and a heavy chain variable region encoded by a polynucleotide sequence comprising SEQ ID NO: 1874; a light chain variable region encoded by a polynucleotide sequence comprising SEQ ID NO: 1718 and a heavy chain variable region encoded by a polynucleotide sequence comprising SEQ ID NO: 1875; a light chain variable region encoded by a polynucleotide sequence comprising SEQ ID NO: 1719 and a heavy chain variable region encoded by a polynucleotide sequence comprising SEQ ID NO: 1876; a light chain variable region encoded by a polynucleotide sequence comprising SEQ ID NO: 1720 and a heavy chain variable region encoded by a polynucleotide sequence comprising SEQ ID NO: 1877; a light chain variable region encoded by a polynucleotide sequence comprising SEQ ID NO: 1721 and a heavy chain variable region encoded by a polynucleotide sequence comprising SEQ ID NO: 1878; a light chain variable region encoded by a polynucleotide sequence comprising SEQ ID NO: 1722 and a heavy chain variable region encoded by a polynucleotide sequence comprising SEQ ID NO: 1879; a light chain variable region encoded by a polynucleotide sequence comprising SEQ ID NO: 1723 and a heavy chain variable region encoded by a polynucleotide sequence comprising SEQ ID NO: 1880; a light chain variable region encoded by a polynucleotide sequence comprising SEQ ID NO: 1724 and a heavy chain variable region encoded by a polynucleotide sequence comprising SEQ ID NO: 1881; a light chain variable region encoded by a polynucleotide sequence comprising SEQ ID NO: 1725 and a heavy chain variable region encoded by a polynucleotide sequence comprising SEQ ID NO: 1882; a light chain variable region encoded by a polynucleotide sequence comprising SEQ ID NO: 1726 and a heavy chain variable region encoded by a polynucleotide sequence comprising SEQ ID NO: 1883; and a light chain variable region encoded by a polynucleotide sequence comprising SEQ ID NO: 1727 and a heavy chain variable region encoded by a polynucleotide sequence comprising SEQ ID NO: 1884.

[0212] Some antigen binding proteins comprise a variable light domain and a variable heavy domain as listed in one of the rows for one of the antibodies listed in TABLE 3. In some instances, the antigen binding protein comprises two identical variable light domains and two identical variable heavy domains from one of the antibodies listed in TABLE 3. Some antigen binding proteins that are provided comprise a variable light domain and a variable heavy domain as listed in one of the rows for one of the antibodies listed in TABLE 3, except that one or both of the domains differs from the sequence specified in the table at only 1, 2, 3, 4, 5, 6, 7, 8, 9, 10, 11, 12, 13, 14 or 15 amino acid residues, wherein each such sequence difference is independently either a single amino acid deletion, insertion or substitution, with the deletions, insertions and/or substitutions resulting in no more than 1, 2, 3, 4, 5, 6, 7, 8, 9, 10, 11, 12, 13, 14 or 15 amino acid changes relative to the variable domain sequences specified in TABLE 3. In one embodiment, the antigen binding protein comprises a variable region sequence from Table 3, but with the N-terminal methionine deleted. Other antigen binding proteins also comprise a variable light domain and a variable heavy domain as listed in one of the rows for one of the antibodies listed in TABLE 3, except that one or both of the domains differs from the sequence specified in the table in that the heavy chain variable domain and/or light chain variable domain comprises or consists of a sequence of amino acids that has at least 70%, 75%, 80%, 85%, 90%, 95%, 96%, 97%, 98%, or 99% sequence identity to the amino acid sequences of the heavy chain variable domain or light chain variable domain sequences as specified in TABLE 3.

[0213] In another aspect, the antigen binding protein consists just of a variable light or variable heavy domain from an antibody listed in TABLE 3. In still another aspect, the antigen binding protein comprises two or more of the same variable heavy domains or two or more of the same variable light domains from those listed in TABLE 3. Such domain antibodies can be fused together or joined via a linker as described in greater detail below. The domain antibodies can also be fused or linked to one or more molecules to extend the half-life (e.g., PEG or albumin).

[0214] Other antigen binding proteins that are provided are variants of antibodies formed by combination of the heavy and light chains shown in TABLE 3 and comprise light and/or heavy chains that each have at least 70%, 75%, 80%, 85%, 90%, 95%, 96%, 97%, 98% or 99% identity to the amino acid sequences of these chains. In some instances, such antibodies include at least one heavy chain and one light chain, whereas in other instances the variant forms contain two identical light chains and two identical heavy chains.

[0215] The various combinations of heavy chain variable regions may be combined with any of the various combinations of light chain variable regions.

[0216] In a further embodiment, the isolated antigen binding protein provided herein is a human antibody comprising a sequence as set forth in TABLE 3 and is of the IgG₁-, IgG₂-IgG₃- or IgG₄-type.

[0217] The antigen binding proteins disclosed herein are polypeptides into which one or more CDRs are grafted, inserted and/or joined. An antigen binding protein can have 1, 2, 3, 4, 5 or 6 CDRs. An antigen binding protein thus can have, for example, one heavy chain CDR1 (“CDRH1”), and/or one heavy chain CDR2 (“CDRH2”), and/or one heavy chain CDR3 (“CDRH3”), and/or one light chain CDR1 (“CDRL1”), and/or one light chain CDR2 (“CDRL2”), and/or one light chain CDR3 (“CDRL3”). Some antigen binding proteins include both a CDRH3 and a CDRL3. Specific light and heavy chain CDRs are identified in TABLEs 4A and 4B, respectively.

[0218] Complementarity determining regions (CDRs) and framework regions (FR) of a given antibody may be identified using the system described by Kabat et al. in Sequences of Proteins of Immunological Interest, 5th Ed., US Dept. of Health and Human Services, PHS, NIH, NIH Publication no. 91-3242, 1991. Certain antibodies that are disclosed herein comprise one or more amino acid sequences that are identical or have substantial sequence identity to the amino acid sequences of one or more of the CDRs presented in TABLES 4A and 4B. These CDRs use the system described by Kabat et al. as noted above.

[0219] The structure and properties of CDRs within a naturally occurring antibody has been described, supra. Briefly, in a traditional antibody, the CDRs are embedded within a framework in the heavy and light chain variable region where they constitute the regions responsible for antigen binding and recognition. A variable region comprises at least three heavy or light chain CDRs, see, supra (Kabat et al., 1991, Sequences of Proteins of Immunological Interest, Public Health Service N.I.H., Bethesda, MD; see also Chothia and Lesk, 1987, J Mol. Biol. 196:901-917; Chothia et al., 1989, Nature 342: 877-883), within a framework region (designated framework regions 1-4, FR1, FR2, FR3, and FR4, by Kabat et al., 1991, supra; see also Chothia and Lesk, 1987, supra). The CDRs provided herein, however, may not only be used to define the antigen binding domain of a traditional antibody structure, but may be embedded in a variety of other polypeptide structures, as described herein.

[0220] In one embodiment the antibody or fragment thereof comprises a CDRL1, a CDRL2, a CDRL3, a CDRH1, a CDRH2, and a CDRH3. In one embodiment the antibody or fragment thereof comprises a CDRL1, a CDRL2, a CDRL3, a CDRH1, a CDRH2, and a CDRH3, wherein each CDRL1, CDRL2, CDRL3, CDRH1, CDRH2, and CDRH3, respectively, comprises a sequence selected from the group consisting of SEQ ID NO: 629, SEQ ID NO: 786, SEQ ID NO: 943, SEQ ID NO: 1100, SEQ ID NO: 1257, and SEQ ID NO: 1414; SEQ ID NO: 630, SEQ ID NO: 787, SEQ ID NO: 944, SEQ ID NO: 1101, SEQ ID NO: 1258, and SEQ ID NO: 1415; SEQ ID NO: 631, SEQ ID NO: 788, SEQ ID NO: 945, SEQ ID NO: 1102, SEQ ID NO: 1259, and SEQ ID NO: 1416; SEQ ID NO: 632, SEQ ID NO: 789, SEQ ID NO: 946, SEQ ID NO: 1103, SEQ ID NO: 1260, and SEQ ID NO: 1417; SEQ ID NO: 633, SEQ ID NO: 790, SEQ ID NO: 947, SEQ ID NO: 1104, SEQ ID NO: 1261, and SEQ ID NO: 1418; SEQ ID NO: 634, SEQ ID NO: 791, SEQ ID NO: 948, SEQ ID NO: 1105, SEQ ID NO: 1262, and SEQ ID NO: 1419; SEQ ID NO: 635, SEQ ID NO: 792, SEQ ID NO: 949, SEQ ID NO: 1106, SEQ ID NO: 1263, and SEQ ID NO: 1420; SEQ ID NO: 636, SEQ ID NO: 793, SEQ ID NO: 950, SEQ ID NO: 1107, SEQ ID NO: 1264, and SEQ ID NO: 1421; SEQ ID NO: 637, SEQ ID NO: 794, SEQ ID NO: 951, SEQ ID NO: 1108, SEQ ID NO: 1265, and SEQ ID NO: 1422; SEQ ID NO: 638, SEQ ID NO: 795, SEQ ID NO: 952, SEQ ID NO: 1109, SEQ ID NO: 1266, and SEQ ID NO: 1423; SEQ ID NO: 639, SEQ ID NO: 796, SEQ ID NO: 953, SEQ ID NO: 1110, SEQ ID NO: 1267, and SEQ ID NO: 1424; SEQ ID NO: 640, SEQ ID NO: 797, SEQ ID NO: 954, SEQ ID NO: 1111, SEQ ID NO: 1268, and SEQ ID NO: 1425; SEQ ID NO: 641, SEQ ID NO: 798, SEQ ID NO: 955, SEQ ID NO: 1112, SEQ ID NO: 1269, and SEQ ID NO: 1426; SEQ ID NO: 642, SEQ ID NO: 799, SEQ ID NO: 956, SEQ ID NO: 1113, SEQ ID NO: 1270, and SEQ ID NO: 1427; SEQ ID NO: 643, SEQ ID NO: 800, SEQ ID NO: 957, SEQ ID NO: 1114, SEQ ID NO: 1271, and SEQ ID NO: 1428; SEQ ID NO: 644, SEQ ID NO: 801, SEQ ID NO: 958, SEQ ID NO: 1115, SEQ ID NO: 1272, and SEQ ID NO: 1429; SEQ ID NO: 645, SEQ ID NO: 802, SEQ ID NO: 959, SEQ ID NO: 1116, SEQ ID NO: 1273, and SEQ ID NO: 1430; SEQ ID NO: 646, SEQ ID NO: 803, SEQ ID NO: 960, SEQ ID NO: 1117, SEQ ID NO: 1274, and SEQ ID NO: 1431; SEQ ID NO: 647, SEQ ID NO: 804, SEQ ID NO: 961, SEQ ID NO: 1118, SEQ ID NO: 1275, and SEQ ID NO: 1432; SEQ ID NO: 648, SEQ ID NO: 805, SEQ ID NO: 962, SEQ ID NO: 1119, SEQ ID NO: 1276, and SEQ ID NO: 1433; SEQ ID NO: 649, SEQ ID NO: 806, SEQ ID NO: 963, SEQ ID NO: 1120, SEQ ID NO: 1277, and SEQ ID NO: 1434; SEQ ID NO: 650, SEQ ID NO: 807, SEQ ID NO: 964, SEQ ID NO: 1121, SEQ ID NO: 1278, and SEQ ID NO: 1435; SEQ ID NO: 651, SEQ ID NO: 808, SEQ ID NO: 965, SEQ ID NO: 1122, SEQ ID NO: 1279, and SEQ ID NO: 1436; SEQ ID NO: 652, SEQ ID NO: 809, SEQ ID NO: 966, SEQ ID NO: 1123, SEQ ID NO: 1280, and SEQ ID NO: 1437; SEQ ID NO: 653, SEQ ID NO: 810, SEQ ID NO: 967, SEQ ID NO: 1124, SEQ ID NO: 1281, and SEQ ID NO: 1438; SEQ ID NO: 654, SEQ ID NO: 811, SEQ ID NO: 968, SEQ ID NO: 1125, SEQ ID NO: 1282, and SEQ ID NO: 1439; SEQ ID NO: 655, SEQ ID NO: 812, SEQ ID NO: 969, SEQ ID NO: 1126, SEQ ID NO: 1283, and SEQ ID NO: 1440; SEQ ID NO: 656, SEQ ID NO: 813, SEQ ID NO: 970, SEQ ID NO: 1127, SEQ ID NO: 1284, and SEQ ID NO: 1441; SEQ ID NO: 657, SEQ ID NO: 814, SEQ ID NO: 971, SEQ ID NO: 1128, SEQ ID NO: 1285, and SEQ ID NO: 1442; SEQ ID NO: 658, SEQ ID NO: 815, SEQ ID NO: 972, SEQ ID NO: 1129, SEQ ID NO: 1286, and SEQ ID NO: 1443; SEQ ID NO: 659, SEQ ID NO: 816, SEQ ID NO: 973, SEQ ID NO: 1130, SEQ ID NO: 1287, and SEQ ID NO: 1444; SEQ ID NO: 660, SEQ ID NO: 817, SEQ ID NO: 974, SEQ ID NO: 1131, SEQ ID NO: 1288, and SEQ ID NO: 1445; SEQ ID NO: 661, SEQ ID NO: 818, SEQ ID NO: 975, SEQ ID NO: 1132, SEQ ID NO: 1289, and SEQ ID NO: 1446; SEQ ID NO: 662, SEQ ID NO: 819, SEQ ID NO: 976, SEQ ID NO: 1133, SEQ ID NO: 1290, and SEQ ID NO: 1447; SEQ ID NO: 663, SEQ ID NO: 820, SEQ ID NO: 977, SEQ ID NO: 1134, SEQ ID NO: 1291, and SEQ ID NO: 1448; SEQ ID NO: 664, SEQ ID NO: 821, SEQ ID NO: 978, SEQ ID NO: 1135, SEQ ID NO: 1292, and SEQ ID NO: 1449; SEQ ID NO: 665, SEQ ID NO: 822, SEQ ID NO: 979, SEQ ID NO: 1136, SEQ ID NO: 1293, and SEQ ID NO: 1450; SEQ ID NO: 666, SEQ ID NO: 823, SEQ ID NO: 980, SEQ ID NO: 1137, SEQ ID NO: 1294, and SEQ ID NO: 1451; SEQ ID NO: 667, SEQ ID NO: 824, SEQ ID NO: 981, SEQ ID NO: 1138, SEQ ID NO: 1295, and SEQ ID NO: 1452; SEQ ID NO: 668, SEQ ID NO: 825, SEQ ID NO: 982, SEQ ID NO: 1139, SEQ ID NO: 1296, and SEQ ID NO: 1453; SEQ ID NO: 669, SEQ ID NO: 826, SEQ ID NO: 983, SEQ ID NO: 1140, SEQ ID NO: 1297, and SEQ ID NO: 1454; SEQ ID NO: 670, SEQ ID NO: 827, SEQ ID NO: 984, SEQ ID NO: 1141, SEQ ID NO: 1298, and SEQ ID NO: 1455; SEQ ID NO: 671, SEQ ID NO: 828, SEQ ID NO: 985, SEQ ID NO: 1142, SEQ ID NO: 1299, and SEQ ID NO: 1456; SEQ ID NO: 672, SEQ ID NO: 829, SEQ ID NO: 986, SEQ ID NO: 1143, SEQ ID NO: 1300, and SEQ ID NO: 1457; SEQ ID NO: 673, SEQ ID NO: 830, SEQ ID NO: 987, SEQ ID NO: 1144, SEQ ID NO: 1301, and SEQ ID NO: 1458; SEQ ID NO: 674, SEQ ID NO: 831, SEQ ID NO: 988, SEQ ID NO: 1145, SEQ ID NO: 1302, and SEQ ID NO: 1459; SEQ ID NO: 675, SEQ ID NO: 832, SEQ ID NO: 989, SEQ ID NO: 1146, SEQ ID NO: 1303, and SEQ ID NO: 1460; SEQ ID NO: 676, SEQ ID NO: 833, SEQ ID NO: 990, SEQ ID NO: 1147, SEQ ID NO: 1304, and SEQ ID NO: 1461; SEQ ID NO: 677, SEQ ID NO: 834, SEQ ID NO: 991, SEQ ID NO: 1148, SEQ ID NO: 1305, and SEQ ID NO: 1462; SEQ ID NO: 678, SEQ ID NO: 835, SEQ ID NO: 992, SEQ ID NO: 1149, SEQ ID NO: 1306, and SEQ ID NO: 1463; SEQ ID NO: 679, SEQ ID NO: 836, SEQ ID NO: 993, SEQ ID NO: 1150, SEQ ID NO: 1307, and SEQ ID NO: 1464; SEQ ID NO: 680, SEQ ID NO: 837, SEQ ID NO: 994, SEQ ID NO: 1151, SEQ ID NO: 1308, and SEQ ID NO: 1465; SEQ ID NO: 681, SEQ ID NO: 838, SEQ ID NO: 995, SEQ ID NO: 1152, SEQ ID NO: 1309, and SEQ ID NO: 1466; SEQ ID NO: 682, SEQ ID NO: 839, SEQ ID NO: 996, SEQ ID NO: 1153, SEQ ID NO: 1310, and SEQ ID NO: 1467; SEQ ID NO: 683, SEQ ID NO: 840, SEQ ID NO: 997, SEQ ID NO: 1154, SEQ ID NO: 1311, and SEQ ID NO: 1468; SEQ ID NO: 684, SEQ ID NO: 841, SEQ ID NO: 998, SEQ ID NO: 1155, SEQ ID NO: 1312, and SEQ ID NO: 1469; SEQ ID NO: 685, SEQ ID NO: 842, SEQ ID NO: 999, SEQ ID NO: 1156, SEQ ID NO: 1313, and SEQ ID NO: 1470; SEQ ID NO: 686, SEQ ID NO: 843, SEQ ID NO: 1000, SEQ ID NO: 1157, SEQ ID NO: 1314, and SEQ ID NO: 1471; SEQ ID NO: 687, SEQ ID NO: 844, SEQ ID NO: 1001, SEQ ID NO: 1158, SEQ ID NO: 1315, and SEQ ID NO: 1472; SEQ ID NO: 688, SEQ ID NO: 845, SEQ ID NO: 1002, SEQ ID NO: 1159, SEQ ID NO: 1316, and SEQ ID NO: 1473; SEQ ID NO: 689, SEQ ID NO: 846, SEQ ID NO: 1003, SEQ ID NO: 1160, SEQ ID NO: 1317, and SEQ ID NO: 1474; SEQ ID NO: 690, SEQ ID NO: 847, SEQ ID NO: 1004, SEQ ID NO: 1161, SEQ ID NO: 1318, and SEQ ID NO: 1475; SEQ ID NO: 691, SEQ ID NO: 848, SEQ ID NO: 1005, SEQ ID NO: 1162, SEQ ID NO: 1319, and SEQ ID NO: 1476; SEQ ID NO: 692, SEQ ID NO: 849, SEQ ID NO: 1006, SEQ ID NO: 1163, SEQ ID NO: 1320, and SEQ ID NO: 1477; SEQ ID NO: 693, SEQ ID NO: 850, SEQ ID NO: 1007, SEQ ID NO: 1164, SEQ ID NO: 1321, and SEQ ID NO: 1478; SEQ ID NO: 694, SEQ ID NO: 851, SEQ ID NO: 1008, SEQ ID NO: 1165, SEQ ID NO: 1322, and SEQ ID NO: 1479; SEQ ID NO: 695, SEQ ID NO: 852, SEQ ID NO: 1009, SEQ ID NO: 1166, SEQ ID NO: 1323, and SEQ ID NO: 1480; SEQ ID NO: 696, SEQ ID NO: 853, SEQ ID NO: 1010, SEQ ID NO: 1167, SEQ ID NO: 1324, and SEQ ID NO: 1481; SEQ ID NO: 697, SEQ ID NO: 854, SEQ ID NO: 1011, SEQ ID NO: 1168, SEQ ID NO: 1325, and SEQ ID NO: 1482; SEQ ID NO: 698, SEQ ID NO: 855, SEQ ID NO: 1012, SEQ ID NO: 1169, SEQ ID NO: 1326, and SEQ ID NO: 1483; SEQ ID NO: 699, SEQ ID NO: 856, SEQ ID NO: 1013, SEQ ID NO: 1170, SEQ ID NO: 1327, and SEQ ID NO: 1484; SEQ ID NO: 700, SEQ ID NO: 857, SEQ ID NO: 1014, SEQ ID NO: 1171, SEQ ID NO: 1328, and SEQ ID NO: 1485; SEQ ID NO: 701, SEQ ID NO: 858, SEQ ID NO: 1015, SEQ ID NO: 1172, SEQ ID NO: 1329, and SEQ ID NO: 1486; SEQ ID NO: 702, SEQ ID NO: 859, SEQ ID NO: 1016, SEQ ID NO: 1173, SEQ ID NO: 1330, and SEQ ID NO: 1487; SEQ ID NO: 703, SEQ ID NO: 860, SEQ ID NO: 1017, SEQ ID NO: 1174, SEQ ID NO: 1331, and SEQ ID NO: 1488; SEQ ID NO: 704, SEQ ID NO: 861, SEQ ID NO: 1018, SEQ ID NO: 1175, SEQ ID NO: 1332, and SEQ ID NO: 1489; SEQ ID NO: 705, SEQ ID NO: 862, SEQ ID NO: 1019, SEQ ID NO: 1176, SEQ ID NO: 1333, and SEQ ID NO: 1490; SEQ ID NO: 706, SEQ ID NO: 863, SEQ ID NO: 1020, SEQ ID NO: 1177, SEQ ID NO: 1334, and SEQ ID NO: 1491; SEQ ID NO: 707, SEQ ID NO: 864, SEQ ID NO: 1021, SEQ ID NO: 1178, SEQ ID NO: 1335, and SEQ ID NO: 1492; SEQ ID NO: 708, SEQ ID NO: 865, SEQ ID NO: 1022, SEQ ID NO: 1179, SEQ ID NO: 1336, and SEQ ID NO: 1493; SEQ ID NO: 709, SEQ ID NO: 866, SEQ ID NO: 1023, SEQ ID NO: 1180, SEQ ID NO: 1337, and SEQ ID NO: 1494; SEQ ID NO: 710, SEQ ID NO: 867, SEQ ID NO: 1024, SEQ ID NO: 1181, SEQ ID NO: 1338, and SEQ ID NO: 1495; SEQ ID NO: 711, SEQ ID NO: 868, SEQ ID NO: 1025, SEQ ID NO: 1182, SEQ ID NO: 1339, and SEQ ID NO: 1496; SEQ ID NO: 712, SEQ ID NO: 869, SEQ ID NO: 1026, SEQ ID NO: 1183, SEQ ID NO: 1340, and SEQ ID NO: 1497; SEQ ID NO: 713, SEQ ID NO: 870, SEQ ID NO: 1027, SEQ ID NO: 1184, SEQ ID NO: 1341, and SEQ ID NO: 1498; SEQ ID NO: 714, SEQ ID NO: 871, SEQ ID NO: 1028, SEQ ID NO: 1185, SEQ ID NO: 1342, and SEQ ID NO: 1499; SEQ ID NO: 715, SEQ ID NO: 872, SEQ ID NO: 1029, SEQ ID NO: 1186, SEQ ID NO: 1343, and SEQ ID NO: 1500; SEQ ID NO: 716, SEQ ID NO: 873, SEQ ID NO: 1030, SEQ ID NO: 1187, SEQ ID NO: 1344, and SEQ ID NO: 1501; SEQ ID NO: 717, SEQ ID NO: 874, SEQ ID NO: 1031, SEQ ID NO: 1188, SEQ ID NO: 1345, and SEQ ID NO: 1502; SEQ ID NO: 718, SEQ ID NO: 875, SEQ ID NO: 1032, SEQ ID NO: 1189, SEQ ID NO: 1346, and SEQ ID NO: 1503; SEQ ID NO: 719, SEQ ID NO: 876, SEQ ID NO: 1033, SEQ ID NO: 1190, SEQ ID NO: 1347, and SEQ ID NO: 1504; SEQ ID NO: 720, SEQ ID NO: 877, SEQ ID NO: 1034, SEQ ID NO: 1191, SEQ ID NO: 1348, and SEQ ID NO: 1505; SEQ ID NO: 721, SEQ ID NO: 878, SEQ ID NO: 1035, SEQ ID NO: 1192, SEQ ID NO: 1349, and SEQ ID NO: 1506; SEQ ID NO: 722, SEQ ID NO: 879, SEQ ID NO: 1036, SEQ ID NO: 1193, SEQ ID NO: 1350, and SEQ ID NO: 1507; SEQ ID NO: 723, SEQ ID NO: 880, SEQ ID NO: 1037, SEQ ID NO: 1194, SEQ ID NO: 1351, and SEQ ID NO: 1508; SEQ ID NO: 724, SEQ ID NO: 881, SEQ ID NO: 1038, SEQ ID NO: 1195, SEQ ID NO: 1352, and SEQ ID NO: 1509; SEQ ID NO: 725, SEQ ID NO: 882, SEQ ID NO: 1039, SEQ ID NO: 1196, SEQ ID NO: 1353, and SEQ ID NO: 1510; SEQ ID NO: 726, SEQ ID NO: 883, SEQ ID NO: 1040, SEQ ID NO: 1197, SEQ ID NO: 1354, and SEQ ID NO: 1511; SEQ ID NO: 727, SEQ ID NO: 884, SEQ ID NO: 1041, SEQ ID NO: 1198, SEQ ID NO: 1355, and SEQ ID NO: 1512; SEQ ID NO: 728, SEQ ID NO: 885, SEQ ID NO: 1042, SEQ ID NO: 1199, SEQ ID NO: 1356, and SEQ ID NO: 1513; SEQ ID NO: 729, SEQ ID NO: 886, SEQ ID NO: 1043, SEQ ID NO: 1200, SEQ ID NO: 1357, and SEQ ID NO: 1514; SEQ ID NO: 730, SEQ ID NO: 887, SEQ ID NO: 1044, SEQ ID NO: 1201, SEQ ID NO: 1358, and SEQ ID NO: 1515; SEQ ID NO: 731, SEQ ID NO: 888, SEQ ID NO: 1045, SEQ ID NO: 1202, SEQ ID NO: 1359, and SEQ ID NO: 1516; SEQ ID NO: 732, SEQ ID NO: 889, SEQ ID NO: 1046, SEQ ID NO: 1203, SEQ ID NO: 1360, and SEQ ID NO: 1517; SEQ ID NO: 733, SEQ ID NO: 890, SEQ ID NO: 1047, SEQ ID NO: 1204, SEQ ID NO: 1361, and SEQ ID NO: 1518; SEQ ID NO: 734, SEQ ID NO: 891, SEQ ID NO: 1048, SEQ ID NO: 1205, SEQ ID NO: 1362, and SEQ ID NO: 1519; SEQ ID NO: 735, SEQ ID NO: 892, SEQ ID NO: 1049, SEQ ID NO: 1206, SEQ ID NO: 1363, and SEQ ID NO: 1520; SEQ ID NO: 736, SEQ ID NO: 893, SEQ ID NO: 1050, SEQ ID NO: 1207, SEQ ID NO: 1364, and SEQ ID NO: 1521; SEQ ID NO: 737, SEQ ID NO: 894, SEQ ID NO: 1051, SEQ ID NO: 1208, SEQ ID NO: 1365, and SEQ ID NO: 1522; SEQ ID NO: 738, SEQ ID NO: 895, SEQ ID NO: 1052, SEQ ID NO: 1209, SEQ ID NO: 1366, and SEQ ID NO: 1523; SEQ ID NO: 739, SEQ ID NO: 896, SEQ ID NO: 1053, SEQ ID NO: 1210, SEQ ID NO: 1367, and SEQ ID NO: 1524; SEQ ID NO: 740, SEQ ID NO: 897, SEQ ID NO: 1054, SEQ ID NO: 1211, SEQ ID NO: 1368, and SEQ ID NO: 1525; SEQ ID NO: 741, SEQ ID NO: 898, SEQ ID NO: 1055, SEQ ID NO: 1212, SEQ ID NO: 1369, and SEQ ID NO: 1526; SEQ ID NO: 742, SEQ ID NO: 899, SEQ ID NO: 1056, SEQ ID NO: 1213, SEQ ID NO: 1370, and SEQ ID NO: 1527; SEQ ID NO: 743, SEQ ID NO: 900, SEQ ID NO: 1057, SEQ ID NO: 1214, SEQ ID NO: 1371, and SEQ ID NO: 1528; SEQ ID NO: 744, SEQ ID NO: 901, SEQ ID NO: 1058, SEQ ID NO: 1215, SEQ ID NO: 1372, and SEQ ID NO: 1529; SEQ ID NO: 745, SEQ ID NO: 902, SEQ ID NO: 1059, SEQ ID NO: 1216, SEQ ID NO: 1373, and SEQ ID NO: 1530; SEQ ID NO: 746, SEQ ID NO: 903, SEQ ID NO: 1060, SEQ ID NO: 1217, SEQ ID NO: 1374, and SEQ ID NO: 1531; SEQ ID NO: 747, SEQ ID NO: 904, SEQ ID NO: 1061, SEQ ID NO: 1218, SEQ ID NO: 1375, and SEQ ID NO: 1532; SEQ ID NO: 748, SEQ ID NO: 905, SEQ ID NO: 1062, SEQ ID NO: 1219, SEQ ID NO: 1376, and SEQ ID NO: 1533; SEQ ID NO: 749, SEQ ID NO: 906, SEQ ID NO: 1063, SEQ ID NO: 1220, SEQ ID NO: 1377, and SEQ ID NO: 1534; SEQ ID NO: 750, SEQ ID NO: 907, SEQ ID NO: 1064, SEQ ID NO: 1221, SEQ ID NO: 1378, and SEQ ID NO: 1535; SEQ ID NO: 751, SEQ ID NO: 908, SEQ ID NO: 1065, SEQ ID NO: 1222, SEQ ID NO: 1379, and SEQ ID NO: 1536; SEQ ID NO: 752, SEQ ID NO: 909, SEQ ID NO: 1066, SEQ ID NO: 1223, SEQ ID NO: 1380, and SEQ ID NO: 1537; SEQ ID NO: 753, SEQ ID NO: 910, SEQ ID NO: 1067, SEQ ID NO: 1224, SEQ ID NO: 1381, and SEQ ID NO: 1538; SEQ ID NO: 754, SEQ ID NO: 911, SEQ ID NO: 1068, SEQ ID NO: 1225, SEQ ID NO: 1382, and SEQ ID NO: 1539; SEQ ID NO: 755, SEQ ID NO: 912, SEQ ID NO: 1069, SEQ ID NO: 1226, SEQ ID NO: 1383, and SEQ ID NO: 1540; SEQ ID NO: 756, SEQ ID NO: 913, SEQ ID NO: 1070, SEQ ID NO: 1227, SEQ ID NO: 1384, and SEQ ID NO: 1541; SEQ ID NO: 757, SEQ ID NO: 914, SEQ ID NO: 1071, SEQ ID NO: 1228, SEQ ID NO: 1385, and SEQ ID NO: 1542; SEQ ID NO: 758, SEQ ID NO: 915, SEQ ID NO: 1072, SEQ ID NO: 1229, SEQ ID NO: 1386, and SEQ ID NO: 1543; SEQ ID NO: 759, SEQ ID NO: 916, SEQ ID NO: 1073, SEQ ID NO: 1230, SEQ ID NO: 1387, and SEQ ID NO: 1544; SEQ ID NO: 760, SEQ ID NO: 917, SEQ ID NO: 1074, SEQ ID NO: 1231, SEQ ID NO: 1388, and SEQ ID NO: 1545; SEQ ID NO: 761, SEQ ID NO: 918, SEQ ID NO: 1075, SEQ ID NO: 1232, SEQ ID NO: 1389, and SEQ ID NO: 1546; SEQ ID NO: 762, SEQ ID NO: 919, SEQ ID NO: 1076, SEQ ID NO: 1233, SEQ ID NO: 1390, and SEQ ID NO: 1547; SEQ ID NO: 763, SEQ ID NO: 920, SEQ ID NO: 1077, SEQ ID NO: 1234, SEQ ID NO: 1391, and SEQ ID NO: 1548; SEQ ID NO: 764, SEQ ID NO: 921, SEQ ID NO: 1078, SEQ ID NO: 1235, SEQ ID NO: 1392, and SEQ ID NO: 1549; SEQ ID NO: 765, SEQ ID NO: 922, SEQ ID NO: 1079, SEQ ID NO: 1236, SEQ ID NO: 1393, and SEQ ID NO: 1550; SEQ ID NO: 766, SEQ ID NO: 923, SEQ ID NO: 1080, SEQ ID NO: 1237, SEQ ID NO: 1394, and SEQ ID NO: 1551; SEQ ID NO: 767, SEQ ID NO: 924, SEQ ID NO: 1081, SEQ ID NO: 1238, SEQ ID NO: 1395, and SEQ ID NO: 1552; SEQ ID NO: 768, SEQ ID NO: 925, SEQ ID NO: 1082, SEQ ID NO: 1239, SEQ ID NO: 1396, and SEQ ID NO: 1553; SEQ ID NO: 769, SEQ ID NO: 926, SEQ ID NO: 1083, SEQ ID NO: 1240, SEQ ID NO: 1397, and SEQ ID NO: 1554; SEQ ID NO: 770, SEQ ID NO: 927, SEQ ID NO: 1084, SEQ ID NO: 1241, SEQ ID NO: 1398, and SEQ ID NO: 1555; SEQ ID NO: 771, SEQ ID NO: 928, SEQ ID NO: 1085, SEQ ID NO: 1242, SEQ ID NO: 1399, and SEQ ID NO: 1556; SEQ ID NO: 772, SEQ ID NO: 929, SEQ ID NO: 1086, SEQ ID NO: 1243, SEQ ID NO: 1400, and SEQ ID NO: 1557; SEQ ID NO: 773, SEQ ID NO: 930, SEQ ID NO: 1087, SEQ ID NO: 1244, SEQ ID NO: 1401, and SEQ ID NO: 1558; SEQ ID NO: 774, SEQ ID NO: 931, SEQ ID NO: 1088, SEQ ID NO: 1245, SEQ ID NO: 1402, and SEQ ID NO: 1559; SEQ ID NO: 775, SEQ ID NO: 932, SEQ ID NO: 1089, SEQ ID NO: 1246, SEQ ID NO: 1403, and SEQ ID NO: 1560; SEQ ID NO: 776, SEQ ID NO: 933, SEQ ID NO: 1090, SEQ ID NO: 1247, SEQ ID NO: 1404, and SEQ ID NO: 1561; SEQ ID NO: 777, SEQ ID NO: 934, SEQ ID NO: 1091, SEQ ID NO: 1248, SEQ ID NO: 1405, and SEQ ID NO: 1562; SEQ ID NO: 778, SEQ ID NO: 935, SEQ ID NO: 1092, SEQ ID NO: 1249, SEQ ID NO: 1406, and SEQ ID NO: 1563; SEQ ID NO: 779, SEQ ID NO: 936, SEQ ID NO: 1093, SEQ ID NO: 1250, SEQ ID NO: 1407, and SEQ ID NO: 1564; SEQ ID NO: 780, SEQ ID NO: 937, SEQ ID NO: 1094, SEQ ID NO: 1251, SEQ ID NO: 1408, and SEQ ID NO: 1565; SEQ ID NO: 781, SEQ ID NO: 938, SEQ ID NO: 1095, SEQ ID NO: 1252, SEQ ID NO: 1409, and SEQ ID NO: 1566; SEQ ID NO: 782, SEQ ID NO: 939, SEQ ID NO: 1096, SEQ ID NO: 1253, SEQ ID NO: 1410, and SEQ ID NO: 1567; SEQ ID NO: 783, SEQ ID NO: 940, SEQ ID NO: 1097, SEQ ID NO: 1254, SEQ ID NO: 1411, and SEQ ID NO: 1568; SEQ ID NO: 784, SEQ ID NO: 941, SEQ ID NO: 1098, SEQ ID NO: 1255, SEQ ID NO: 1412, and SEQ ID NO: 1569; and SEQ ID NO: 785, SEQ ID NO: 942, SEQ ID NO: 1099, SEQ ID NO: 1256, SEQ ID NO: 1413, and SEQ ID NO: 1570.

[0221] In one embodiment the antibody or fragment thereof comprises a CDRL1, a CDRL2, a CDRL3, a CDRH1, a CDRH2, and a CDRH3 encoded by a polynucleotide. In one embodiment the antibody or fragment thereof comprises a CDRL1, a CDRL2, a CDRL3, a CDRH1, a CDRH2, and a CDRH3, wherein each CDRL1, CDRL2, CDRL3, CDRH1, CDRH2, and CDRH3, respectively, is encoded by a sequence selected from the group consisting of SEQ ID NO: 2199, SEQ ID NO: 2356, SEQ ID NO: 2513, SEQ ID NO: 2670, SEQ ID NO: 2827, and SEQ ID NO: 2984; SEQ ID NO: 2200, SEQ ID NO: 2357, SEQ ID NO: 2514, SEQ ID NO: 2671, SEQ ID NO: 2828, and SEQ ID NO: 2985; SEQ ID NO: 2201, SEQ ID NO: 2358, SEQ ID NO: 2515, SEQ ID NO: 2672, SEQ ID NO: 2829, and SEQ ID NO: 2986; SEQ ID NO: 2202, SEQ ID NO: 2359, SEQ ID NO: 2516, SEQ ID NO: 2673, SEQ ID NO: 2830, and SEQ ID NO: 2987; SEQ ID NO: 2203, SEQ ID NO: 2360, SEQ ID NO: 2517, SEQ ID NO: 2674, SEQ ID NO: 2831, and SEQ ID NO: 2988; SEQ ID NO: 2204, SEQ ID NO: 2361, SEQ ID NO: 2518, SEQ ID NO: 2675, SEQ ID NO: 2832, and SEQ ID NO: 2989; SEQ ID NO: 2205, SEQ ID NO: 2362, SEQ ID NO: 2519, SEQ ID NO: 2676, SEQ ID NO: 2833, and SEQ ID NO: 2990; SEQ ID NO: 2206, SEQ ID NO: 2363, SEQ ID NO: 2520, SEQ ID NO: 2677, SEQ ID NO: 2834, and SEQ ID NO: 2991; SEQ ID NO: 2207, SEQ ID NO: 2364, SEQ ID NO: 2521, SEQ ID NO: 2678, SEQ ID NO: 2835, and SEQ ID NO: 2992; SEQ ID NO: 2208, SEQ ID NO: 2365, SEQ ID NO: 2522, SEQ ID NO: 2679, SEQ ID NO: 2836, and SEQ ID NO: 2993; SEQ ID NO: 2209, SEQ ID NO: 2366, SEQ ID NO: 2523, SEQ ID NO: 2680, SEQ ID NO: 2837, and SEQ ID NO: 2994; SEQ ID NO: 2210, SEQ ID NO: 2367, SEQ ID NO: 2524, SEQ ID NO: 2681, SEQ ID NO: 2838, and SEQ ID NO: 2995; SEQ ID NO: 2211, SEQ ID NO: 2368, SEQ ID NO: 2525, SEQ ID NO: 2682, SEQ ID NO: 2839, and SEQ ID NO: 2996; SEQ ID NO: 2212, SEQ ID NO: 2369, SEQ ID NO: 2526, SEQ ID NO: 2683, SEQ ID NO: 2840, and SEQ ID NO: 2997; SEQ ID NO: 2213, SEQ ID NO: 2370, SEQ ID NO: 2527, SEQ ID NO: 2684, SEQ ID NO: 2841, and SEQ ID NO: 2998; SEQ ID NO: 2214, SEQ ID NO: 2371, SEQ ID NO: 2528, SEQ ID NO: 2685, SEQ ID NO: 2842, and SEQ ID NO: 2999; SEQ ID NO: 2215, SEQ ID NO: 2372, SEQ ID NO: 2529, SEQ ID NO: 2686, SEQ ID NO: 2843, and SEQ ID NO: 3000; SEQ ID NO: 2216, SEQ ID NO: 2373, SEQ ID NO: 2530, SEQ ID NO: 2687, SEQ ID NO: 2844, and SEQ ID NO: 3001; SEQ ID NO: 2217, SEQ ID NO: 2374, SEQ ID NO: 2531, SEQ ID NO: 2688, SEQ ID NO: 2845, and SEQ ID NO: 3002; SEQ ID NO: 2218, SEQ ID NO: 2375, SEQ ID NO: 2532, SEQ ID NO: 2689, SEQ ID NO: 2846, and SEQ ID NO: 3003; SEQ ID NO: 2219, SEQ ID NO: 2376, SEQ ID NO: 2533, SEQ ID NO: 2690, SEQ ID NO: 2847, and SEQ ID NO: 3004; SEQ ID NO: 2220, SEQ ID NO: 2377, SEQ ID NO: 2534, SEQ ID NO: 2691, SEQ ID NO: 2848, and SEQ ID NO: 3005; SEQ ID NO: 2221, SEQ ID NO: 2378, SEQ ID NO: 2535, SEQ ID NO: 2692, SEQ ID NO: 2849, and SEQ ID NO: 3006; SEQ ID NO: 2222, SEQ ID NO: 2379, SEQ ID NO: 2536, SEQ ID NO: 2693, SEQ ID NO: 2850, and SEQ ID NO: 3007; SEQ ID NO: 2223, SEQ ID NO: 2380, SEQ ID NO: 2537, SEQ ID NO: 2694, SEQ ID NO: 2851, and SEQ ID NO: 3008; SEQ ID NO: 2224, SEQ ID NO: 2381, SEQ ID NO: 2538, SEQ ID NO: 2695, SEQ ID NO: 2852, and SEQ ID NO: 3009; SEQ ID NO: 2225, SEQ ID NO: 2382, SEQ ID NO: 2539, SEQ ID NO: 2696, SEQ ID NO: 2853, and SEQ ID NO: 3010; SEQ ID NO: 2226, SEQ ID NO: 2383, SEQ ID NO: 2540, SEQ ID NO: 2697, SEQ ID NO: 2854, and SEQ ID NO: 3011; SEQ ID NO: 2227, SEQ ID NO: 2384, SEQ ID NO: 2541, SEQ ID NO: 2698, SEQ ID NO: 2855, and SEQ ID NO: 3012; SEQ ID NO: 2228, SEQ ID NO: 2385, SEQ ID NO: 2542, SEQ ID NO: 2699, SEQ ID NO: 2856, and SEQ ID NO: 3013; SEQ ID NO: 2229, SEQ ID NO: 2386, SEQ ID NO: 2543, SEQ ID NO: 2700, SEQ ID NO: 2857, and SEQ ID NO: 3014; SEQ ID NO: 2230, SEQ ID NO: 2387, SEQ ID NO: 2544, SEQ ID NO: 2701, SEQ ID NO: 2858, and SEQ ID NO: 3015; SEQ ID NO: 2231, SEQ ID NO: 2388, SEQ ID NO: 2545, SEQ ID NO: 2702, SEQ ID NO: 2859, and SEQ ID NO: 3016; SEQ ID NO: 2232, SEQ ID NO: 2389, SEQ ID NO: 2546, SEQ ID NO: 2703, SEQ ID NO: 2860, and SEQ ID NO: 3017; SEQ ID NO: 2233, SEQ ID NO: 2390, SEQ ID NO: 2547, SEQ ID NO: 2704, SEQ ID NO: 2861, and SEQ ID NO: 3018; SEQ ID NO: 2234, SEQ ID NO: 2391, SEQ ID NO: 2548, SEQ ID NO: 2705, SEQ ID NO: 2862, and SEQ ID NO: 3019; SEQ ID NO: 2235, SEQ ID NO: 2392, SEQ ID NO: 2549, SEQ ID NO: 2706, SEQ ID NO: 2863, and SEQ ID NO: 3020; SEQ ID NO: 2236, SEQ ID NO: 2393, SEQ ID NO: 2550, SEQ ID NO: 2707, SEQ ID NO: 2864, and SEQ ID NO: 3021; SEQ ID NO: 2237, SEQ ID NO: 2394, SEQ ID NO: 2551, SEQ ID NO: 2708, SEQ ID NO: 2865, and SEQ ID NO: 3022; SEQ ID NO: 2238, SEQ ID NO: 2395, SEQ ID NO: 2552, SEQ ID NO: 2709, SEQ ID NO: 2866, and SEQ ID NO: 3023; SEQ ID NO: 2239, SEQ ID NO: 2396, SEQ ID NO: 2553, SEQ ID NO: 2710, SEQ ID NO: 2867, and SEQ ID NO: 3024; SEQ ID NO: 2240, SEQ ID NO: 2397, SEQ ID NO: 2554, SEQ ID NO: 2711, SEQ ID NO: 2868, and SEQ ID NO: 3025; SEQ ID NO: 2241, SEQ ID NO: 2398, SEQ ID NO: 2555, SEQ ID NO: 2712, SEQ ID NO: 2869, and SEQ ID NO: 3026; SEQ ID NO: 2242, SEQ ID NO: 2399, SEQ ID NO: 2556, SEQ ID NO: 2713, SEQ ID NO: 2870, and SEQ ID NO: 3027; SEQ ID NO: 2243, SEQ ID NO: 2400, SEQ ID NO: 2557, SEQ ID NO: 2714, SEQ ID NO: 2871, and SEQ ID NO: 3028; SEQ ID NO: 2244, SEQ ID NO: 2401, SEQ ID NO: 2558, SEQ ID NO: 2715, SEQ ID NO: 2872, and SEQ ID NO: 3029; SEQ ID NO: 2245, SEQ ID NO: 2402, SEQ ID NO: 2559, SEQ ID NO: 2716, SEQ ID NO: 2873, and SEQ ID NO: 3030; SEQ ID NO: 2246, SEQ ID NO: 2403, SEQ ID NO: 2560, SEQ ID NO: 2717, SEQ ID NO: 2874, and SEQ ID NO: 3031; SEQ ID NO: 2247, SEQ ID NO: 2404, SEQ ID NO: 2561, SEQ ID NO: 2718, SEQ ID NO: 2875, and SEQ ID NO: 3032; SEQ ID NO: 2248, SEQ ID NO: 2405, SEQ ID NO: 2562, SEQ ID NO: 2719, SEQ ID NO: 2876, and SEQ ID NO: 3033; SEQ ID NO: 2249, SEQ ID NO: 2406, SEQ ID NO: 2563, SEQ ID NO: 2720, SEQ ID NO: 2877, and SEQ ID NO: 3034; SEQ ID NO: 2250, SEQ ID NO: 2407, SEQ ID NO: 2564, SEQ ID NO: 2721, SEQ ID NO: 2878, and SEQ ID NO: 3035; SEQ ID NO: 2251, SEQ ID NO: 2408, SEQ ID NO: 2565, SEQ ID NO: 2722, SEQ ID NO: 2879, and SEQ ID NO: 3036; SEQ ID NO: 2252, SEQ ID NO: 2409, SEQ ID NO: 2566, SEQ ID NO: 2723, SEQ ID NO: 2880, and SEQ ID NO: 3037; SEQ ID NO: 2253, SEQ ID NO: 2410, SEQ ID NO: 2567, SEQ ID NO: 2724, SEQ ID NO: 2881, and SEQ ID NO: 3038; SEQ ID NO: 2254, SEQ ID NO: 2411, SEQ ID NO: 2568, SEQ ID NO: 2725, SEQ ID NO: 2882, and SEQ ID NO: 3039; SEQ ID NO: 2255, SEQ ID NO: 2412, SEQ ID NO: 2569, SEQ ID NO: 2726, SEQ ID NO: 2883, and SEQ ID NO: 3040; SEQ ID NO: 2256, SEQ ID NO: 2413, SEQ ID NO: 2570, SEQ ID NO: 2727, SEQ ID NO: 2884, and SEQ ID NO: 3041; SEQ ID NO: 2257, SEQ ID NO: 2414, SEQ ID NO: 2571, SEQ ID NO: 2728, SEQ ID NO: 2885, and SEQ ID NO: 3042; SEQ ID NO: 2258, SEQ ID NO: 2415, SEQ ID NO: 2572, SEQ ID NO: 2729, SEQ ID NO: 2886, and SEQ ID NO: 3043; SEQ ID NO: 2259, SEQ ID NO: 2416, SEQ ID NO: 2573, SEQ ID NO: 2730, SEQ ID NO: 2887, and SEQ ID NO: 3044; SEQ ID NO: 2260, SEQ ID NO: 2417, SEQ ID NO: 2574, SEQ ID NO: 2731, SEQ ID NO: 2888, and SEQ ID NO: 3045; SEQ ID NO: 2261, SEQ ID NO: 2418, SEQ ID NO: 2575, SEQ ID NO: 2732, SEQ ID NO: 2889, and SEQ ID NO: 3046; SEQ ID NO: 2262, SEQ ID NO: 2419, SEQ ID NO: 2576, SEQ ID NO: 2733, SEQ ID NO: 2890, and SEQ ID NO: 3047; SEQ ID NO: 2263, SEQ ID NO: 2420, SEQ ID NO: 2577, SEQ ID NO: 2734, SEQ ID NO: 2891, and SEQ ID NO: 3048; SEQ ID NO: 2264, SEQ ID NO: 2421, SEQ ID NO: 2578, SEQ ID NO: 2735, SEQ ID NO: 2892, and SEQ ID NO: 3049; SEQ ID NO: 2265, SEQ ID NO: 2422, SEQ ID NO: 2579, SEQ ID NO: 2736, SEQ ID NO: 2893, and SEQ ID NO: 3050; SEQ ID NO: 2266, SEQ ID NO: 2423, SEQ ID NO: 2580, SEQ ID NO: 2737, SEQ ID NO: 2894, and SEQ ID NO: 3051; SEQ ID NO: 2267, SEQ ID NO: 2424, SEQ ID NO: 2581, SEQ ID NO: 2738, SEQ ID NO: 2895, and SEQ ID NO: 3052; SEQ ID NO: 2268, SEQ ID NO: 2425, SEQ ID NO: 2582, SEQ ID NO: 2739, SEQ ID NO: 2896, and SEQ ID NO: 3053; SEQ ID NO: 2269, SEQ ID NO: 2426, SEQ ID NO: 2583, SEQ ID NO: 2740, SEQ ID NO: 2897, and SEQ ID NO: 3054; SEQ ID NO: 2270, SEQ ID NO: 2427, SEQ ID NO: 2584, SEQ ID NO: 2741, SEQ ID NO: 2898, and SEQ ID NO: 3055; SEQ ID NO: 2271, SEQ ID NO: 2428, SEQ ID NO: 2585, SEQ ID NO: 2742, SEQ ID NO: 2899, and SEQ ID NO: 3056; SEQ ID NO: 2272, SEQ ID NO: 2429, SEQ ID NO: 2586, SEQ ID NO: 2743, SEQ ID NO: 2900, and SEQ ID NO: 3057; SEQ ID NO: 2273, SEQ ID NO: 2430, SEQ ID NO: 2587, SEQ ID NO: 2744, SEQ ID NO: 2901, and SEQ ID NO: 3058; SEQ ID NO: 2274, SEQ ID NO: 2431, SEQ ID NO: 2588, SEQ ID NO: 2745, SEQ ID NO: 2902, and SEQ ID NO: 3059; SEQ ID NO: 2275, SEQ ID NO: 2432, SEQ ID NO: 2589, SEQ ID NO: 2746, SEQ ID NO: 2903, and SEQ ID NO: 3060; SEQ ID NO: 2276, SEQ ID NO: 2433, SEQ ID NO: 2590, SEQ ID NO: 2747, SEQ ID NO: 2904, and SEQ ID NO: 3061; SEQ ID NO: 2277, SEQ ID NO: 2434, SEQ ID NO: 2591, SEQ ID NO: 2748, SEQ ID NO: 2905, and SEQ ID NO: 3062; SEQ ID NO: 2278, SEQ ID NO: 2435, SEQ ID NO: 2592, SEQ ID NO: 2749, SEQ ID NO: 2906, and SEQ ID NO: 3063; SEQ ID NO: 2279, SEQ ID NO: 2436, SEQ ID NO: 2593, SEQ ID NO: 2750, SEQ ID NO: 2907, and SEQ ID NO: 3064; SEQ ID NO: 2280, SEQ ID NO: 2437, SEQ ID NO: 2594, SEQ ID NO: 2751, SEQ ID NO: 2908, and SEQ ID NO: 3065; SEQ ID NO: 2281, SEQ ID NO: 2438, SEQ ID NO: 2595, SEQ ID NO: 2752, SEQ ID NO: 2909, and SEQ ID NO: 3066; SEQ ID NO: 2282, SEQ ID NO: 2439, SEQ ID NO: 2596, SEQ ID NO: 2753, SEQ ID NO: 2910, and SEQ ID NO: 3067; SEQ ID NO: 2283, SEQ ID NO: 2440, SEQ ID NO: 2597, SEQ ID NO: 2754, SEQ ID NO: 2911, and SEQ ID NO: 3068; SEQ ID NO: 2284, SEQ ID NO: 2441, SEQ ID NO: 2598, SEQ ID NO: 2755, SEQ ID NO: 2912, and SEQ ID NO: 3069; SEQ ID NO: 2285, SEQ ID NO: 2442, SEQ ID NO: 2599, SEQ ID NO: 2756, SEQ ID NO: 2913, and SEQ ID NO: 3070; SEQ ID NO: 2286, SEQ ID NO: 2443, SEQ ID NO: 2600, SEQ ID NO: 2757, SEQ ID NO: 2914, and SEQ ID NO: 3071; SEQ ID NO: 2287, SEQ ID NO: 2444, SEQ ID NO: 2601, SEQ ID NO: 2758, SEQ ID NO: 2915, and SEQ ID NO: 3072; SEQ ID NO: 2288, SEQ ID NO: 2445, SEQ ID NO: 2602, SEQ ID NO: 2759, SEQ ID NO: 2916, and SEQ ID NO: 3073; SEQ ID NO: 2289, SEQ ID NO: 2446, SEQ ID NO: 2603, SEQ ID NO: 2760, SEQ ID NO: 2917, and SEQ ID NO: 3074; SEQ ID NO: 2290, SEQ ID NO: 2447, SEQ ID NO: 2604, SEQ ID NO: 2761, SEQ ID NO: 2918, and SEQ ID NO: 3075; SEQ ID NO: 2291, SEQ ID NO: 2448, SEQ ID NO: 2605, SEQ ID NO: 2762, SEQ ID NO: 2919, and SEQ ID NO: 3076; SEQ ID NO: 2292, SEQ ID NO: 2449, SEQ ID NO: 2606, SEQ ID NO: 2763, SEQ ID NO: 2920, and SEQ ID NO: 3077; SEQ ID NO: 2293, SEQ ID NO: 2450, SEQ ID NO: 2607, SEQ ID NO: 2764, SEQ ID NO: 2921, and SEQ ID NO: 3078; SEQ ID NO: 2294, SEQ ID NO: 2451, SEQ ID NO: 2608, SEQ ID NO: 2765, SEQ ID NO: 2922, and SEQ ID NO: 3079; SEQ ID NO: 2295, SEQ ID NO: 2452, SEQ ID NO: 2609, SEQ ID NO: 2766, SEQ ID NO: 2923, and SEQ ID NO: 3080; SEQ ID NO: 2296, SEQ ID NO: 2453, SEQ ID NO: 2610, SEQ ID NO: 2767, SEQ ID NO: 2924, and SEQ ID NO: 3081; SEQ ID NO: 2297, SEQ ID NO: 2454, SEQ ID NO: 2611, SEQ ID NO: 2768, SEQ ID NO: 2925, and SEQ ID NO: 3082; SEQ ID NO: 2298, SEQ ID NO: 2455, SEQ ID NO: 2612, SEQ ID NO: 2769, SEQ ID NO: 2926, and SEQ ID NO: 3083; SEQ ID NO: 2299, SEQ ID NO: 2456, SEQ ID NO: 2613, SEQ ID NO: 2770, SEQ ID NO: 2927, and SEQ ID NO: 3084; SEQ ID NO: 2300, SEQ ID NO: 2457, SEQ ID NO: 2614, SEQ ID NO: 2771, SEQ ID NO: 2928, and SEQ ID NO: 3085; SEQ ID NO: 2301, SEQ ID NO: 2458, SEQ ID NO: 2615, SEQ ID NO: 2772, SEQ ID NO: 2929, and SEQ ID NO: 3086; SEQ ID NO: 2302, SEQ ID NO: 2459, SEQ ID NO: 2616, SEQ ID NO: 2773, SEQ ID NO: 2930, and SEQ ID NO: 3087; SEQ ID NO: 2303, SEQ ID NO: 2460, SEQ ID NO: 2617, SEQ ID NO: 2774, SEQ ID NO: 2931, and SEQ ID NO: 3088; SEQ ID NO: 2304, SEQ ID NO: 2461, SEQ ID NO: 2618, SEQ ID NO: 2775, SEQ ID NO: 2932, and SEQ ID NO: 3089; SEQ ID NO: 2305, SEQ ID NO: 2462, SEQ ID NO: 2619, SEQ ID NO: 2776, SEQ ID NO: 2933, and SEQ ID NO: 3090; SEQ ID NO: 2306, SEQ ID NO: 2463, SEQ ID NO: 2620, SEQ ID NO: 2777, SEQ ID NO: 2934, and SEQ ID NO: 3091; SEQ ID NO: 2307, SEQ ID NO: 2464, SEQ ID NO: 2621, SEQ ID NO: 2778, SEQ ID NO: 2935, and SEQ ID NO: 3092; SEQ ID NO: 2308, SEQ ID NO: 2465, SEQ ID NO: 2622, SEQ ID NO: 2779, SEQ ID NO: 2936, and SEQ ID NO: 3093; SEQ ID NO: 2309, SEQ ID NO: 2466, SEQ ID NO: 2623, SEQ ID NO: 2780, SEQ ID NO: 2937, and SEQ ID NO: 3094; SEQ ID NO: 2310, SEQ ID NO: 2467, SEQ ID NO: 2624, SEQ ID NO: 2781, SEQ ID NO: 2938, and SEQ ID NO: 3095; SEQ ID NO: 2311, SEQ ID NO: 2468, SEQ ID NO: 2625, SEQ ID NO: 2782, SEQ ID NO: 2939, and SEQ ID NO: 3096; SEQ ID NO: 2312, SEQ ID NO: 2469, SEQ ID NO: 2626, SEQ ID NO: 2783, SEQ ID NO: 2940, and SEQ ID NO: 3097; SEQ ID NO: 2313, SEQ ID NO: 2470, SEQ ID NO: 2627, SEQ ID NO: 2784, SEQ ID NO: 2941, and SEQ ID NO: 3098; SEQ ID NO: 2314, SEQ ID NO: 2471, SEQ ID NO: 2628, SEQ ID NO: 2785, SEQ ID NO: 2942, and SEQ ID NO: 3099; SEQ ID NO: 2315, SEQ ID NO: 2472, SEQ ID NO: 2629, SEQ ID NO: 2786, SEQ ID NO: 2943, and SEQ ID NO: 3100; SEQ ID NO: 2316, SEQ ID NO: 2473, SEQ ID NO: 2630, SEQ ID NO: 2787, SEQ ID NO: 2944, and SEQ ID NO: 3101; SEQ ID NO: 2317, SEQ ID NO: 2474, SEQ ID NO: 2631, SEQ ID NO: 2788, SEQ ID NO: 2945, and SEQ ID NO: 3102; SEQ ID NO: 2318, SEQ ID NO: 2475, SEQ ID NO: 2632, SEQ ID NO: 2789, SEQ ID NO: 2946, and SEQ ID NO: 3103; SEQ ID NO: 2319, SEQ ID NO: 2476, SEQ ID NO: 2633, SEQ ID NO: 2790, SEQ ID NO: 2947, and SEQ ID NO: 3104; SEQ ID NO: 2320, SEQ ID NO: 2477, SEQ ID NO: 2634, SEQ ID NO: 2791, SEQ ID NO: 2948, and SEQ ID NO: 3105; SEQ ID NO: 2321, SEQ ID NO: 2478, SEQ ID NO: 2635, SEQ ID NO: 2792, SEQ ID NO: 2949, and SEQ ID NO: 3106; SEQ ID NO: 2322, SEQ ID NO: 2479, SEQ ID NO: 2636, SEQ ID NO: 2793, SEQ ID NO: 2950, and SEQ ID NO: 3107; SEQ ID NO: 2323, SEQ ID NO: 2480, SEQ ID NO: 2637, SEQ ID NO: 2794, SEQ ID NO: 2951, and SEQ ID NO: 3108; SEQ ID NO: 2324, SEQ ID NO: 2481, SEQ ID NO: 2638, SEQ ID NO: 2795, SEQ ID NO: 2952, and SEQ ID NO: 3109; SEQ ID NO: 2325, SEQ ID NO: 2482, SEQ ID NO: 2639, SEQ ID NO: 2796, SEQ ID NO: 2953, and SEQ ID NO: 3110; SEQ ID NO: 2326, SEQ ID NO: 2483, SEQ ID NO: 2640, SEQ ID NO: 2797, SEQ ID NO: 2954, and SEQ ID NO: 3111; SEQ ID NO: 2327, SEQ ID NO: 2484, SEQ ID NO: 2641, SEQ ID NO: 2798, SEQ ID NO: 2955, and SEQ ID NO: 3112; SEQ ID NO: 2328, SEQ ID NO: 2485, SEQ ID NO: 2642, SEQ ID NO: 2799, SEQ ID NO: 2956, and SEQ ID NO: 3113; SEQ ID NO: 2329, SEQ ID NO: 2486, SEQ ID NO: 2643, SEQ ID NO: 2800, SEQ ID NO: 2957, and SEQ ID NO: 3114; SEQ ID NO: 2330, SEQ ID NO: 2487, SEQ ID NO: 2644, SEQ ID NO: 2801, SEQ ID NO: 2958, and SEQ ID NO: 3115; SEQ ID NO: 2331, SEQ ID NO: 2488, SEQ ID NO: 2645, SEQ ID NO: 2802, SEQ ID NO: 2959, and SEQ ID NO: 3116; SEQ ID NO: 2332, SEQ ID NO: 2489, SEQ ID NO: 2646, SEQ ID NO: 2803, SEQ ID NO: 2960, and SEQ ID NO: 3117; SEQ ID NO: 2333, SEQ ID NO: 2490, SEQ ID NO: 2647, SEQ ID NO: 2804, SEQ ID NO: 2961, and SEQ ID NO: 3118; SEQ ID NO: 2334, SEQ ID NO: 2491, SEQ ID NO: 2648, SEQ ID NO: 2805, SEQ ID NO: 2962, and SEQ ID NO: 3119; SEQ ID NO: 2335, SEQ ID NO: 2492, SEQ ID NO: 2649, SEQ ID NO: 2806, SEQ ID NO: 2963, and SEQ ID NO: 3120; SEQ ID NO: 2336, SEQ ID NO: 2493, SEQ ID NO: 2650, SEQ ID NO: 2807, SEQ ID NO: 2964, and SEQ ID NO: 3121; SEQ ID NO: 2337, SEQ ID NO: 2494, SEQ ID NO: 2651, SEQ ID NO: 2808, SEQ ID NO: 2965, and SEQ ID NO: 3122; SEQ ID NO: 2338, SEQ ID NO: 2495, SEQ ID NO: 2652, SEQ ID NO: 2809, SEQ ID NO: 2966, and SEQ ID NO: 3123; SEQ ID NO: 2339, SEQ ID NO: 2496, SEQ ID NO: 2653, SEQ ID NO: 2810, SEQ ID NO: 2967, and SEQ ID NO: 3124; SEQ ID NO: 2340, SEQ ID NO: 2497, SEQ ID NO: 2654, SEQ ID NO: 2811, SEQ ID NO: 2968, and SEQ ID NO: 3125; SEQ ID NO: 2341, SEQ ID NO: 2498, SEQ ID NO: 2655, SEQ ID NO: 2812, SEQ ID NO: 2969, and SEQ ID NO: 3126; SEQ ID NO: 2342, SEQ ID NO: 2499, SEQ ID NO: 2656, SEQ ID NO: 2813, SEQ ID NO: 2970, and SEQ ID NO: 3127; SEQ ID NO: 2343, SEQ ID NO: 2500, SEQ ID NO: 2657, SEQ ID NO: 2814, SEQ ID NO: 2971, and SEQ ID NO: 3128; SEQ ID NO: 2344, SEQ ID NO: 2501, SEQ ID NO: 2658, SEQ ID NO: 2815, SEQ ID NO: 2972, and SEQ ID NO: 3129; SEQ ID NO: 2345, SEQ ID NO: 2502, SEQ ID NO: 2659, SEQ ID NO: 2816, SEQ ID NO: 2973, and SEQ ID NO: 3130; SEQ ID NO: 2346, SEQ ID NO: 2503, SEQ ID NO: 2660, SEQ ID NO: 2817, SEQ ID NO: 2974, and SEQ ID NO: 3131; SEQ ID NO: 2347, SEQ ID NO: 2504, SEQ ID NO: 2661, SEQ ID NO: 2818, SEQ ID NO: 2975, and SEQ ID NO: 3132; SEQ ID NO: 2348, SEQ ID NO: 2505, SEQ ID NO: 2662, SEQ ID NO: 2819, SEQ ID NO: 2976, and SEQ ID NO: 3133; SEQ ID NO: 2349, SEQ ID NO: 2506, SEQ ID NO: 2663, SEQ ID NO: 2820, SEQ ID NO: 2977, and SEQ ID NO: 3134; SEQ ID NO: 2350, SEQ ID NO: 2507, SEQ ID NO: 2664, SEQ ID NO: 2821, SEQ ID NO: 2978, and SEQ ID NO: 3135; SEQ ID NO: 2351, SEQ ID NO: 2508, SEQ ID NO: 2665, SEQ ID NO: 2822, SEQ ID NO: 2979, and SEQ ID NO: 3136; SEQ ID NO: 2352, SEQ ID NO: 2509, SEQ ID NO: 2666, SEQ ID NO: 2823, SEQ ID NO: 2980, and SEQ ID NO: 3137; SEQ ID NO: 2353, SEQ ID NO: 2510, SEQ ID NO: 2667, SEQ ID NO: 2824, SEQ ID NO: 2981, and SEQ ID NO: 3138; SEQ ID NO: 2354, SEQ ID NO: 2511, SEQ ID NO: 2668, SEQ ID NO: 2825, SEQ ID NO: 2982, and SEQ ID NO: 3139; and SEQ ID NO: 2355, SEQ ID NO: 2512, SEQ ID NO: 2669, SEQ ID NO: 2826, SEQ ID NO: 2983, and SEQ ID NO: 3140.

[0222] In another aspect, an antigen binding protein includes 1, 2, 3, 4, 5, or 6 variant forms of the CDRs listed in TABLES 4A and 4B, each having at least 80%, 85%, 90%, 95%, 96%, 97%, 98%, or 99% sequence identity to a CDR sequence listed in TABLES 4A and 4B. Some antigen binding proteins include 1, 2, 3, 4, 5, or 6 of the CDRs listed in TABLES 4A and 4B, each or collectively differing by no more than 1, 2, 3, 4 or 5 amino acids from the CDRs listed in this table.

[0223] In various other embodiments, the antigen binding protein is derived from such antibodies. For instance, in one aspect, the antigen binding protein comprises 1, 2, 3, 4, 5 or all 6 of the CDRs listed in one of the rows for any particular antibody listed in TABLES 4A and 4B. In another aspect, an antigen binding protein includes 1, 2, 3, 4, 5, or 6 variant forms of the CDRs listed in one of the rows for an antibody in TABLES 4A and 4B, each CDR having at least 80%, 85%, 90%, 95%, 96%, 97%, 98%, or 99% sequence identity to a CDR sequence listed in TABLES 4A and 4B. Some antigen binding proteins include 1, 2, 3, 4, 5, or 6 of the CDRs listed in one of the rows of TABLES 4A and 4B, each differing by no more than 1, 2, 3, 4 or 5 amino acids from the CDRs listed in these tables. In another aspect, the antigen binding protein comprises all 6 of the CDRS listed in a row of TABLES 4A and 4B and the total number of amino acid changes to the CDRs collectively is no more than 1, 2, 3, 4, or 5 amino acids.

[0224] In one embodiment the antibody or fragment thereof comprises a light chain comprising a sequence selected from the group consisting of SEQ ID NOs: 315-471 and a heavy chain comprising a sequence selected from the group consisting of SEQ ID NOs: 472-628. In one embodiment the antibody or fragment thereof comprises a combination of a light chain and a heavy chain selected from the group consisting of a light chain comprising SEQ ID NO: 315 and a heavy chain comprising SEQ ID NO: 472; a light chain comprising SEQ ID NO: 316 and a heavy chain comprising SEQ ID NO: 473; a light chain comprising SEQ ID NO: 317 and a heavy chain comprising SEQ ID NO: 474; a light chain comprising SEQ ID NO: 318 and a heavy chain comprising SEQ ID NO: 475; a light chain comprising SEQ ID NO: 319 and a heavy chain comprising SEQ ID NO: 476; a light chain comprising SEQ ID NO: 320 and a heavy chain comprising SEQ ID NO: 477; a light chain comprising SEQ ID NO: 321 and a heavy chain comprising SEQ ID NO: 478; a light chain comprising SEQ ID NO: 322 and a heavy chain comprising SEQ ID NO: 479; a light chain comprising SEQ ID NO: 323 and a heavy chain comprising SEQ ID NO: 480; a light chain comprising SEQ ID NO: 324 and a heavy chain comprising SEQ ID NO: 481; a light chain comprising SEQ ID NO: 325 and a heavy chain comprising SEQ ID NO: 482; a light chain comprising SEQ ID NO: 326 and a heavy chain comprising SEQ ID NO: 483; a light chain comprising SEQ ID NO: 327 and a heavy chain comprising SEQ ID NO: 484; a light chain comprising SEQ ID NO: 328 and a heavy chain comprising SEQ ID NO: 485; a light chain comprising SEQ ID NO: 329 and a heavy chain comprising SEQ ID NO: 486; a light chain comprising SEQ ID NO: 330 and a heavy chain comprising SEQ ID NO: 487; a light chain comprising SEQ ID NO: 331 and a heavy chain comprising SEQ ID NO: 488; a light chain comprising SEQ ID NO: 332 and a heavy chain comprising SEQ ID NO: 489; a light chain comprising SEQ ID NO: 333 and a heavy chain comprising SEQ ID NO: 490; a light chain comprising SEQ ID NO: 334 and a heavy chain comprising SEQ ID NO: 491; a light chain comprising SEQ ID NO: 335 and a heavy chain comprising SEQ ID NO: 492; a light chain comprising SEQ ID NO: 336 and a heavy chain comprising SEQ ID NO: 493; a light chain comprising SEQ ID NO: 337 and a heavy chain comprising SEQ ID NO: 494; a light chain comprising SEQ ID NO: 338 and a heavy chain comprising SEQ ID NO: 495; a light chain comprising SEQ ID NO: 339 and a heavy chain comprising SEQ ID NO: 496; a light chain comprising SEQ ID NO: 340 and a heavy chain comprising SEQ ID NO: 497; a light chain comprising SEQ ID NO: 341 and a heavy chain comprising SEQ ID NO: 498; a light chain comprising SEQ ID NO: 342 and a heavy chain comprising SEQ ID NO: 499; a light chain comprising SEQ ID NO: 343 and a heavy chain comprising SEQ ID NO: 500; a light chain comprising SEQ ID NO: 344 and a heavy chain comprising SEQ ID NO: 501; a light chain comprising SEQ ID NO: 345 and a heavy chain comprising SEQ ID NO: 502; a light chain comprising SEQ ID NO: 346 and a heavy chain comprising SEQ ID NO: 503; a light chain comprising SEQ ID NO: 347 and a heavy chain comprising SEQ ID NO: 504; a light chain comprising SEQ ID NO: 348 and a heavy chain comprising SEQ ID NO: 505; a light chain comprising SEQ ID NO: 349 and a heavy chain comprising SEQ ID NO: 506; a light chain comprising SEQ ID NO: 350 and a heavy chain comprising SEQ ID NO: 507; a light chain comprising SEQ ID NO: 351 and a heavy chain comprising SEQ ID NO: 508; a light chain comprising SEQ ID NO: 352 and a heavy chain comprising SEQ ID NO: 509; a light chain comprising SEQ ID NO: 353 and a heavy chain comprising SEQ ID NO: 510; a light chain comprising SEQ ID NO: 354 and a heavy chain comprising SEQ ID NO: 511; a light chain comprising SEQ ID NO: 355 and a heavy chain comprising SEQ ID NO: 512; a light chain comprising SEQ ID NO: 356 and a heavy chain comprising SEQ ID NO: 513; a light chain comprising SEQ ID NO: 357 and a heavy chain comprising SEQ ID NO: 514; a light chain comprising SEQ ID NO: 358 and a heavy chain comprising SEQ ID NO: 515; a light chain comprising SEQ ID NO: 359 and a heavy chain comprising SEQ ID NO: 516; a light chain comprising SEQ ID NO: 360 and a heavy chain comprising SEQ ID NO: 517; a light chain comprising SEQ ID NO: 361 and a heavy chain comprising SEQ ID NO: 518; a light chain comprising SEQ ID NO: 362 and a heavy chain comprising SEQ ID NO: 519; a light chain comprising SEQ ID NO: 363 and a heavy chain comprising SEQ ID NO: 520; a light chain comprising SEQ ID NO: 364 and a heavy chain comprising SEQ ID NO: 521; a light chain comprising SEQ ID NO: 365 and a heavy chain comprising SEQ ID NO: 522; a light chain comprising SEQ ID NO: 366 and a heavy chain comprising SEQ ID NO: 523; a light chain comprising SEQ ID NO: 367 and a heavy chain comprising SEQ ID NO: 524; a light chain comprising SEQ ID NO: 368 and a heavy chain comprising SEQ ID NO: 525; a light chain comprising SEQ ID NO: 369 and a heavy chain comprising SEQ ID NO: 526; a light chain comprising SEQ ID NO: 370 and a heavy chain comprising SEQ ID NO: 527; a light chain comprising SEQ ID NO: 371 and a heavy chain comprising SEQ ID NO: 528; a light chain comprising SEQ ID NO: 372 and a heavy chain comprising SEQ ID NO: 529; a light chain comprising SEQ ID NO: 373 and a heavy chain comprising SEQ ID NO: 530; a light chain comprising SEQ ID NO: 374 and a heavy chain comprising SEQ ID NO: 531; a light chain comprising SEQ ID NO: 375 and a heavy chain comprising SEQ ID NO: 532; a light chain comprising SEQ ID NO: 376 and a heavy chain comprising SEQ ID NO: 533; a light chain comprising SEQ ID NO: 377 and a heavy chain comprising SEQ ID NO: 534; a light chain comprising SEQ ID NO: 378 and a heavy chain comprising SEQ ID NO: 535; a light chain comprising SEQ ID NO: 379 and a heavy chain comprising SEQ ID NO: 536; a light chain comprising SEQ ID NO: 380 and a heavy chain comprising SEQ ID NO: 537; a light chain comprising SEQ ID NO: 381 and a heavy chain comprising SEQ ID NO: 538; a light chain comprising SEQ ID NO: 382 and a heavy chain comprising SEQ ID NO: 539; a light chain comprising SEQ ID NO: 383 and a heavy chain comprising SEQ ID NO: 540; a light chain comprising SEQ ID NO: 384 and a heavy chain comprising SEQ ID NO: 541; a light chain comprising SEQ ID NO: 385 and a heavy chain comprising SEQ ID NO: 542; a light chain comprising SEQ ID NO: 386 and a heavy chain comprising SEQ ID NO: 543; a light chain comprising SEQ ID NO: 387 and a heavy chain comprising SEQ ID NO: 544; a light chain comprising SEQ ID NO: 388 and a heavy chain comprising SEQ ID NO: 545; a light chain comprising SEQ ID NO: 389 and a heavy chain comprising SEQ ID NO: 546; a light chain comprising SEQ ID NO: 390 and a heavy chain comprising SEQ ID NO: 547; a light chain comprising SEQ ID NO: 391 and a heavy chain comprising SEQ ID NO: 548; a light chain comprising SEQ ID NO: 392 and a heavy chain comprising SEQ ID NO: 549; a light chain comprising SEQ ID NO: 393 and a heavy chain comprising SEQ ID NO: 550; a light chain comprising SEQ ID NO: 394 and a heavy chain comprising SEQ ID NO: 551; a light chain comprising SEQ ID NO: 395 and a heavy chain comprising SEQ ID NO: 552; a light chain comprising SEQ ID NO: 396 and a heavy chain comprising SEQ ID NO: 553; a light chain comprising SEQ ID NO: 397 and a heavy chain comprising SEQ ID NO: 554; a light chain comprising SEQ ID NO: 398 and a heavy chain comprising SEQ ID NO: 555; a light chain comprising SEQ ID NO: 399 and a heavy chain comprising SEQ ID NO: 556; a light chain comprising SEQ ID NO: 400 and a heavy chain comprising SEQ ID NO: 557; a light chain comprising SEQ ID NO: 401 and a heavy chain comprising SEQ ID NO: 558; a light chain comprising SEQ ID NO: 402 and a heavy chain comprising SEQ ID NO: 559; a light chain comprising SEQ ID NO: 403 and a heavy chain comprising SEQ ID NO: 560; a light chain comprising SEQ ID NO: 404 and a heavy chain comprising SEQ ID NO: 561; a light chain comprising SEQ ID NO: 405 and a heavy chain comprising SEQ ID NO: 562; a light chain comprising SEQ ID NO: 406 and a heavy chain comprising SEQ ID NO: 563; a light chain comprising SEQ ID NO: 407 and a heavy chain comprising SEQ ID NO: 564; a light chain comprising SEQ ID NO: 408 and a heavy chain comprising SEQ ID NO: 565; a light chain comprising SEQ ID NO: 409 and a heavy chain comprising SEQ ID NO: 566; a light chain comprising SEQ ID NO: 410 and a heavy chain comprising SEQ ID NO: 567; a light chain comprising SEQ ID NO: 411 and a heavy chain comprising SEQ ID NO: 568; a light chain comprising SEQ ID NO: 412 and a heavy chain comprising SEQ ID NO: 569; a light chain comprising SEQ ID NO: 413 and a heavy chain comprising SEQ ID NO: 570; a light chain comprising SEQ ID NO: 414 and a heavy chain comprising SEQ ID NO: 571; a light chain comprising SEQ ID NO: 415 and a heavy chain comprising SEQ ID NO: 572; a light chain comprising SEQ ID NO: 416 and a heavy chain comprising SEQ ID NO: 573; a light chain comprising SEQ ID NO: 417 and a heavy chain comprising SEQ ID NO: 574; a light chain comprising SEQ ID NO: 418 and a heavy chain comprising SEQ ID NO: 575; a light chain comprising SEQ ID NO: 419 and a heavy chain comprising SEQ ID NO: 576; a light chain comprising SEQ ID NO: 420 and a heavy chain comprising SEQ ID NO: 577; a light chain comprising SEQ ID NO: 421 and a heavy chain comprising SEQ ID NO: 578; a light chain comprising SEQ ID NO: 422 and a heavy chain comprising SEQ ID NO: 579; a light chain comprising SEQ ID NO: 423 and a heavy chain comprising SEQ ID NO: 580; a light chain comprising SEQ ID NO: 424 and a heavy chain comprising SEQ ID NO: 581; a light chain comprising SEQ ID NO: 425 and a heavy chain comprising SEQ ID NO: 582; a light chain comprising SEQ ID NO: 426 and a heavy chain comprising SEQ ID NO: 583; a light chain comprising SEQ ID NO: 427 and a heavy chain comprising SEQ ID NO: 584; a light chain comprising SEQ ID NO: 428 and a heavy chain comprising SEQ ID NO: 585; a light chain comprising SEQ ID NO: 429 and a heavy chain comprising SEQ ID NO: 586; a light chain comprising SEQ ID NO: 430 and a heavy chain comprising SEQ ID NO: 587; a light chain comprising SEQ ID NO: 431 and a heavy chain comprising SEQ ID NO: 588; a light chain comprising SEQ ID NO: 432 and a heavy chain comprising SEQ ID NO: 589; a light chain comprising SEQ ID NO: 433 and a heavy chain comprising SEQ ID NO: 590; a light chain comprising SEQ ID NO: 434 and a heavy chain comprising SEQ ID NO: 591; a light chain comprising SEQ ID NO: 435 and a heavy chain comprising SEQ ID NO: 592; a light chain comprising SEQ ID NO: 436 and a heavy chain comprising SEQ ID NO: 593; a light chain comprising SEQ ID NO: 437 and a heavy chain comprising SEQ ID NO: 594; a light chain comprising SEQ ID NO: 438 and a heavy chain comprising SEQ ID NO: 595; a light chain comprising SEQ ID NO: 439 and a heavy chain comprising SEQ ID NO: 596; a light chain comprising SEQ ID NO: 440 and a heavy chain comprising SEQ ID NO: 597; a light chain comprising SEQ ID NO: 441 and a heavy chain comprising SEQ ID NO: 598; a light chain comprising SEQ ID NO: 442 and a heavy chain comprising SEQ ID NO: 599; a light chain comprising SEQ ID NO: 443 and a heavy chain comprising SEQ ID NO: 600; a light chain comprising SEQ ID NO: 444 and a heavy chain comprising SEQ ID NO: 601; a light chain comprising SEQ ID NO: 445 and a heavy chain comprising SEQ ID NO: 602; a light chain comprising SEQ ID NO: 446 and a heavy chain comprising SEQ ID NO: 603; a light chain comprising SEQ ID NO: 447 and a heavy chain comprising SEQ ID NO: 604; a light chain comprising SEQ ID NO: 448 and a heavy chain comprising SEQ ID NO: 605; a light chain comprising SEQ ID NO: 449 and a heavy chain comprising SEQ ID NO: 606; a light chain comprising SEQ ID NO: 450 and a heavy chain comprising SEQ ID NO: 607; a light chain comprising SEQ ID NO: 451 and a heavy chain comprising SEQ ID NO: 608; a light chain comprising SEQ ID NO: 452 and a heavy chain comprising SEQ ID NO: 609; a light chain comprising SEQ ID NO: 453 and a heavy chain comprising SEQ ID NO: 610; a light chain comprising SEQ ID NO: 454 and a heavy chain comprising SEQ ID NO: 611; a light chain comprising SEQ ID NO: 455 and a heavy chain comprising SEQ ID NO: 612; a light chain comprising SEQ ID NO: 456 and a heavy chain comprising SEQ ID NO: 613; a light chain comprising SEQ ID NO: 457 and a heavy chain comprising SEQ ID NO: 614; a light chain comprising SEQ ID NO: 458 and a heavy chain comprising SEQ ID NO: 615; a light chain comprising SEQ ID NO: 459 and a heavy chain comprising SEQ ID NO: 616; a light chain comprising SEQ ID NO: 460 and a heavy chain comprising SEQ ID NO: 617; a light chain comprising SEQ ID NO: 461 and a heavy chain comprising SEQ ID NO: 618; a light chain comprising SEQ ID NO: 462 and a heavy chain comprising SEQ ID NO: 619; a light chain comprising SEQ ID NO: 463 and a heavy chain comprising SEQ ID NO: 620; a light chain comprising SEQ ID NO: 464 and a heavy chain comprising SEQ ID NO: 621; a light chain comprising SEQ ID NO: 465 and a heavy chain comprising SEQ ID NO: 622; a light chain comprising SEQ ID NO: 466 and a heavy chain comprising SEQ ID NO: 623; a light chain comprising SEQ ID NO: 467 and a heavy chain comprising SEQ ID NO: 624; a light chain comprising SEQ ID NO: 468 and a heavy chain comprising SEQ ID NO: 625; a light chain comprising SEQ ID NO: 469 and a heavy chain comprising SEQ ID NO: 626; a light chain comprising SEQ ID NO: 470 and a heavy chain comprising SEQ ID NO: 627; and a light chain comprising SEQ ID NO: 471 and a heavy chain comprising SEQ ID NO: 628.

[0225] In one embodiment the antibody or fragment thereof comprises a light chain encoded by a polynucleotide sequence selected from the group consisting of SEQ ID NOs: 1885-2014 and a heavy chain comprising a sequence selected from the group consisting of SEQ ID NOs: 2042-2198. In one embodiment the antibody or fragment thereof comprises a combination of a light chain and a heavy chain, selected from the group consisting of a light chain encoded by a polynucleotide sequence comprising SEQ ID NO: 1885 and a heavy chain encoded by a polynucleotide sequence comprising SEQ ID NO: 2042; a light chain encoded by a polynucleotide sequence comprising SEQ ID NO: 1886 and a heavy chain encoded by a polynucleotide sequence comprising SEQ ID NO: 2043; a light chain encoded by a polynucleotide sequence comprising SEQ ID NO: 1887 and a heavy chain encoded by a polynucleotide sequence comprising SEQ ID NO: 2044; a light chain encoded by a polynucleotide sequence comprising SEQ ID NO: 1888 and a heavy chain encoded by a polynucleotide sequence comprising SEQ ID NO: 2045; a light chain encoded by a polynucleotide sequence comprising SEQ ID NO: 1889 and a heavy chain encoded by a polynucleotide sequence comprising SEQ ID NO: 2046; a light chain encoded by a polynucleotide sequence comprising SEQ ID NO: 1890 and a heavy chain encoded by a polynucleotide sequence comprising SEQ ID NO: 2047; a light chain encoded by a polynucleotide sequence comprising SEQ ID NO: 1891 and a heavy chain encoded by a polynucleotide sequence comprising SEQ ID NO: 2048; a light chain encoded by a polynucleotide sequence comprising SEQ ID NO: 1892 and a heavy chain encoded by a polynucleotide sequence comprising SEQ ID NO: 2049; a light chain encoded by a polynucleotide sequence comprising SEQ ID NO: 1893 and a heavy chain encoded by a polynucleotide sequence comprising SEQ ID NO: 2050; a light chain encoded by a polynucleotide sequence comprising SEQ ID NO: 1894 and a heavy chain encoded by a polynucleotide sequence comprising SEQ ID NO: 2051; a light chain encoded by a polynucleotide sequence comprising SEQ ID NO: 1895 and a heavy chain encoded by a polynucleotide sequence comprising SEQ ID NO: 2052; a light chain encoded by a polynucleotide sequence comprising SEQ ID NO: 1896 and a heavy chain encoded by a polynucleotide sequence comprising SEQ ID NO: 2053; a light chain encoded by a polynucleotide sequence comprising SEQ ID NO: 1897 and a heavy chain encoded by a polynucleotide sequence comprising SEQ ID NO: 2054; a light chain encoded by a polynucleotide sequence comprising SEQ ID NO: 1898 and a heavy chain encoded by a polynucleotide sequence comprising SEQ ID NO: 2055; a light chain encoded by a polynucleotide sequence comprising SEQ ID NO: 1899 and a heavy chain encoded by a polynucleotide sequence comprising SEQ ID NO: 2056; a light chain encoded by a polynucleotide sequence comprising SEQ ID NO: 1900 and a heavy chain encoded by a polynucleotide sequence comprising SEQ ID NO: 2057; a light chain encoded by a polynucleotide sequence comprising SEQ ID NO: 1901 and a heavy chain encoded by a polynucleotide sequence comprising SEQ ID NO: 2058; a light chain encoded by a polynucleotide sequence comprising SEQ ID NO: 1902 and a heavy chain encoded by a polynucleotide sequence comprising SEQ ID NO: 2059; a light chain encoded by a polynucleotide sequence comprising SEQ ID NO: 1903 and a heavy chain encoded by a polynucleotide sequence comprising SEQ ID NO: 2060; a light chain encoded by a polynucleotide sequence comprising SEQ ID NO: 1904 and a heavy chain encoded by a polynucleotide sequence comprising SEQ ID NO: 2061; a light chain encoded by a polynucleotide sequence comprising SEQ ID NO: 1905 and a heavy chain encoded by a polynucleotide sequence comprising SEQ ID NO: 2062; a light chain encoded by a polynucleotide sequence comprising SEQ ID NO: 1906 and a heavy chain encoded by a polynucleotide sequence comprising SEQ ID NO: 2063; a light chain encoded by a polynucleotide sequence comprising SEQ ID NO: 1907 and a heavy chain encoded by a polynucleotide sequence comprising SEQ ID NO: 2064; a light chain encoded by a polynucleotide sequence comprising SEQ ID NO: 1908 and a heavy chain encoded by a polynucleotide sequence comprising SEQ ID NO: 2065; a light chain encoded by a polynucleotide sequence comprising SEQ ID NO: 1909 and a heavy chain encoded by a polynucleotide sequence comprising SEQ ID NO: 2066; a light chain encoded by a polynucleotide sequence comprising SEQ ID NO: 1910 and a heavy chain encoded by a polynucleotide sequence comprising SEQ ID NO: 2067; a light chain encoded by a polynucleotide sequence comprising SEQ ID NO: 1911 and a heavy chain encoded by a polynucleotide sequence comprising SEQ ID NO: 2068; a light chain encoded by a polynucleotide sequence comprising SEQ ID NO: 1912 and a heavy chain encoded by a polynucleotide sequence comprising SEQ ID NO: 2069; a light chain encoded by a polynucleotide sequence comprising SEQ ID NO: 1913 and a heavy chain encoded by a polynucleotide sequence comprising SEQ ID NO: 2070; a light chain encoded by a polynucleotide sequence comprising SEQ ID NO: 1914 and a heavy chain encoded by a polynucleotide sequence comprising SEQ ID NO: 2071; a light chain encoded by a polynucleotide sequence comprising SEQ ID NO: 1915 and a heavy chain encoded by a polynucleotide sequence comprising SEQ ID NO: 2072; a light chain encoded by a polynucleotide sequence comprising SEQ ID NO: 1916 and a heavy chain encoded by a polynucleotide sequence comprising SEQ ID NO: 2073; a light chain encoded by a polynucleotide sequence comprising SEQ ID NO: 1917 and a heavy chain encoded by a polynucleotide sequence comprising SEQ ID NO: 2074; a light chain encoded by a polynucleotide sequence comprising SEQ ID NO: 1918 and a heavy chain encoded by a polynucleotide sequence comprising SEQ ID NO: 2075; a light chain encoded by a polynucleotide sequence comprising SEQ ID NO: 1919 and a heavy chain encoded by a polynucleotide sequence comprising SEQ ID NO: 2076; a light chain encoded by a polynucleotide sequence comprising SEQ ID NO: 1920 and a heavy chain encoded by a polynucleotide sequence comprising SEQ ID NO: 2077; a light chain encoded by a polynucleotide sequence comprising SEQ ID NO: 1921 and a heavy chain encoded by a polynucleotide sequence comprising SEQ ID NO: 2078; a light chain encoded by a polynucleotide sequence comprising SEQ ID NO: 1922 and a heavy chain encoded by a polynucleotide sequence comprising SEQ ID NO: 2079; a light chain encoded by a polynucleotide sequence comprising SEQ ID NO: 1923 and a heavy chain encoded by a polynucleotide sequence comprising SEQ ID NO: 2080; a light chain encoded by a polynucleotide sequence comprising SEQ ID NO: 1924 and a heavy chain encoded by a polynucleotide sequence comprising SEQ ID NO: 2081; a light chain encoded by a polynucleotide sequence comprising SEQ ID NO: 1925 and a heavy chain encoded by a polynucleotide sequence comprising SEQ ID NO: 2082; a light chain encoded by a polynucleotide sequence comprising SEQ ID NO: 1926 and a heavy chain encoded by a polynucleotide sequence comprising SEQ ID NO: 2083; a light chain encoded by a polynucleotide sequence comprising SEQ ID NO: 1927 and a heavy chain encoded by a polynucleotide sequence comprising SEQ ID NO: 2084; a light chain encoded by a polynucleotide sequence comprising SEQ ID NO: 1928 and a heavy chain encoded by a polynucleotide sequence comprising SEQ ID NO: 2085; a light chain encoded by a polynucleotide sequence comprising SEQ ID NO: 1929 and a heavy chain encoded by a polynucleotide sequence comprising SEQ ID NO: 2086; a light chain encoded by a polynucleotide sequence comprising SEQ ID NO: 1930 and a heavy chain encoded by a polynucleotide sequence comprising SEQ ID NO: 2087; a light chain encoded by a polynucleotide sequence comprising SEQ ID NO: 1931 and a heavy chain encoded by a polynucleotide sequence comprising SEQ ID NO: 2088; a light chain encoded by a polynucleotide sequence comprising SEQ ID NO: 1932 and a heavy chain encoded by a polynucleotide sequence comprising SEQ ID NO: 2089; a light chain encoded by a polynucleotide sequence comprising SEQ ID NO: 1933 and a heavy chain encoded by a polynucleotide sequence comprising SEQ ID NO: 2090; a light chain encoded by a polynucleotide sequence comprising SEQ ID NO: 1934 and a heavy chain encoded by a polynucleotide sequence comprising SEQ ID NO: 2091; a light chain encoded by a polynucleotide sequence comprising SEQ ID NO: 1935 and a heavy chain encoded by a polynucleotide sequence comprising SEQ ID NO: 2092; a light chain encoded by a polynucleotide sequence comprising SEQ ID NO: 1936 and a heavy chain encoded by a polynucleotide sequence comprising SEQ ID NO: 2093; a light chain encoded by a polynucleotide sequence comprising SEQ ID NO: 1937 and a heavy chain encoded by a polynucleotide sequence comprising SEQ ID NO: 2094; a light chain encoded by a polynucleotide sequence comprising SEQ ID NO: 1938 and a heavy chain encoded by a polynucleotide sequence comprising SEQ ID NO: 2095; a light chain encoded by a polynucleotide sequence comprising SEQ ID NO: 1939 and a heavy chain encoded by a polynucleotide sequence comprising SEQ ID NO: 2096; a light chain encoded by a polynucleotide sequence comprising SEQ ID NO: 1940 and a heavy chain encoded by a polynucleotide sequence comprising SEQ ID NO: 2097; a light chain encoded by a polynucleotide sequence comprising SEQ ID NO: 1941 and a heavy chain encoded by a polynucleotide sequence comprising SEQ ID NO: 2098; a light chain encoded by a polynucleotide sequence comprising SEQ ID NO: 1942 and a heavy chain encoded by a polynucleotide sequence comprising SEQ ID NO: 2099; a light chain encoded by a polynucleotide sequence comprising SEQ ID NO: 1943 and a heavy chain encoded by a polynucleotide sequence comprising SEQ ID NO: 2100; a light chain encoded by a polynucleotide sequence comprising SEQ ID NO: 1944 and a heavy chain encoded by a polynucleotide sequence comprising SEQ ID NO: 2101; a light chain encoded by a polynucleotide sequence comprising SEQ ID NO: 1945 and a heavy chain encoded by a polynucleotide sequence comprising SEQ ID NO: 2102; a light chain encoded by a polynucleotide sequence comprising SEQ ID NO: 1946 and a heavy chain encoded by a polynucleotide sequence comprising SEQ ID NO: 2103; a light chain encoded by a polynucleotide sequence comprising SEQ ID NO: 1947 and a heavy chain encoded by a polynucleotide sequence comprising SEQ ID NO: 2104; a light chain encoded by a polynucleotide sequence comprising SEQ ID NO: 1948 and a heavy chain encoded by a polynucleotide sequence comprising SEQ ID NO: 2105; a light chain encoded by a polynucleotide sequence comprising SEQ ID NO: 1949 and a heavy chain encoded by a polynucleotide sequence comprising SEQ ID NO: 2106; a light chain encoded by a polynucleotide sequence comprising SEQ ID NO: 1950 and a heavy chain encoded by a polynucleotide sequence comprising SEQ ID NO: 2107; a light chain encoded by a polynucleotide sequence comprising SEQ ID NO: 1951 and a heavy chain encoded by a polynucleotide sequence comprising SEQ ID NO: 2108; a light chain encoded by a polynucleotide sequence comprising SEQ ID NO: 1952 and a heavy chain encoded by a polynucleotide sequence comprising SEQ ID NO: 2109; a light chain encoded by a polynucleotide sequence comprising SEQ ID NO: 1953 and a heavy chain encoded by a polynucleotide sequence comprising SEQ ID NO: 2110; a light chain encoded by a polynucleotide sequence comprising SEQ ID NO: 1954 and a heavy chain encoded by a polynucleotide sequence comprising SEQ ID NO: 2111; a light chain encoded by a polynucleotide sequence comprising SEQ ID NO: 1955 and a heavy chain encoded by a polynucleotide sequence comprising SEQ ID NO: 2112; a light chain encoded by a polynucleotide sequence comprising SEQ ID NO: 1956 and a heavy chain encoded by a polynucleotide sequence comprising SEQ ID NO: 2113; a light chain encoded by a polynucleotide sequence comprising SEQ ID NO: 1957 and a heavy chain encoded by a polynucleotide sequence comprising SEQ ID NO: 2114; a light chain encoded by a polynucleotide sequence comprising SEQ ID NO: 1958 and a heavy chain encoded by a polynucleotide sequence comprising SEQ ID NO: 2115; a light chain encoded by a polynucleotide sequence comprising SEQ ID NO: 1959 and a heavy chain encoded by a polynucleotide sequence comprising SEQ ID NO: 2116; a light chain encoded by a polynucleotide sequence comprising SEQ ID NO: 1960 and a heavy chain encoded by a polynucleotide sequence comprising SEQ ID NO: 2117; a light chain encoded by a polynucleotide sequence comprising SEQ ID NO: 1961 and a heavy chain encoded by a polynucleotide sequence comprising SEQ ID NO: 2118; a light chain encoded by a polynucleotide sequence comprising SEQ ID NO: 1962 and a heavy chain encoded by a polynucleotide sequence comprising SEQ ID NO: 2119; a light chain encoded by a polynucleotide sequence comprising SEQ ID NO: 1963 and a heavy chain encoded by a polynucleotide sequence comprising SEQ ID NO: 2120; a light chain encoded by a polynucleotide sequence comprising SEQ ID NO: 1964 and a heavy chain encoded by a polynucleotide sequence comprising SEQ ID NO: 2121; a light chain encoded by a polynucleotide sequence comprising SEQ ID NO: 1965 and a heavy chain encoded by a polynucleotide sequence comprising SEQ ID NO: 2122; a light chain encoded by a polynucleotide sequence comprising SEQ ID NO: 1966 and a heavy chain encoded by a polynucleotide sequence comprising SEQ ID NO: 2123; a light chain encoded by a polynucleotide sequence comprising SEQ ID NO: 1967 and a heavy chain encoded by a polynucleotide sequence comprising SEQ ID NO: 2124; a light chain encoded by a polynucleotide sequence comprising SEQ ID NO: 1968 and a heavy chain encoded by a polynucleotide sequence comprising SEQ ID NO: 2125; a light chain encoded by a polynucleotide sequence comprising SEQ ID NO: 1969 and a heavy chain encoded by a polynucleotide sequence comprising SEQ ID NO: 2126; a light chain encoded by a polynucleotide sequence comprising SEQ ID NO: 1970 and a heavy chain encoded by a polynucleotide sequence comprising SEQ ID NO: 2127; a light chain encoded by a polynucleotide sequence comprising SEQ ID NO: 1971 and a heavy chain encoded by a polynucleotide sequence comprising SEQ ID NO: 2128; a light chain encoded by a polynucleotide sequence comprising SEQ ID NO: 1972 and a heavy chain encoded by a polynucleotide sequence comprising SEQ ID NO: 2129; a light chain encoded by a polynucleotide sequence comprising SEQ ID NO: 1973 and a heavy chain encoded by a polynucleotide sequence comprising SEQ ID NO: 2130; a light chain encoded by a polynucleotide sequence comprising SEQ ID NO: 1974 and a heavy chain encoded by a polynucleotide sequence comprising SEQ ID NO: 2131; a light chain encoded by a polynucleotide sequence comprising SEQ ID NO: 1975 and a heavy chain encoded by a polynucleotide sequence comprising SEQ ID NO: 2132; a light chain encoded by a polynucleotide sequence comprising SEQ ID NO: 1976 and a heavy chain encoded by a polynucleotide sequence comprising SEQ ID NO: 2133; a light chain encoded by a polynucleotide sequence comprising SEQ ID NO: 1977 and a heavy chain encoded by a polynucleotide sequence comprising SEQ ID NO: 2134; a light chain encoded by a polynucleotide sequence comprising SEQ ID NO: 1978 and a heavy chain encoded by a polynucleotide sequence comprising SEQ ID NO: 2135; a light chain encoded by a polynucleotide sequence comprising SEQ ID NO: 1979 and a heavy chain encoded by a polynucleotide sequence comprising SEQ ID NO: 2136; a light chain encoded by a polynucleotide sequence comprising SEQ ID NO: 1980 and a heavy chain encoded by a polynucleotide sequence comprising SEQ ID NO: 2137; a light chain encoded by a polynucleotide sequence comprising SEQ ID NO: 1981 and a heavy chain encoded by a polynucleotide sequence comprising SEQ ID NO: 2138; a light chain encoded by a polynucleotide sequence comprising SEQ ID NO: 1982 and a heavy chain encoded by a polynucleotide sequence comprising SEQ ID NO: 2139; a light chain encoded by a polynucleotide sequence comprising SEQ ID NO: 1983 and a heavy chain encoded by a polynucleotide sequence comprising SEQ ID NO: 2140; a light chain encoded by a polynucleotide sequence comprising SEQ ID NO: 1984 and a heavy chain encoded by a polynucleotide sequence comprising SEQ ID NO: 2141; a light chain encoded by a polynucleotide sequence comprising SEQ ID NO: 1985 and a heavy chain encoded by a polynucleotide sequence comprising SEQ ID NO: 2142; a light chain encoded by a polynucleotide sequence comprising SEQ ID NO: 1986 and a heavy chain encoded by a polynucleotide sequence comprising SEQ ID NO: 2143; a light chain encoded by a polynucleotide sequence comprising SEQ ID NO: 1987 and a heavy chain encoded by a polynucleotide sequence comprising SEQ ID NO: 2144; a light chain encoded by a polynucleotide sequence comprising SEQ ID NO: 1988 and a heavy chain encoded by a polynucleotide sequence comprising SEQ ID NO: 2145; a light chain encoded by a polynucleotide sequence comprising SEQ ID NO: 1989 and a heavy chain encoded by a polynucleotide sequence comprising SEQ ID NO: 2146; a light chain encoded by a polynucleotide sequence comprising SEQ ID NO: 1990 and a heavy chain encoded by a polynucleotide sequence comprising SEQ ID NO: 2147; a light chain encoded by a polynucleotide sequence comprising SEQ ID NO: 1991 and a heavy chain encoded by a polynucleotide sequence comprising SEQ ID NO: 2148; a light chain encoded by a polynucleotide sequence comprising SEQ ID NO: 1992 and a heavy chain encoded by a polynucleotide sequence comprising SEQ ID NO: 2149; a light chain encoded by a polynucleotide sequence comprising SEQ ID NO: 1993 and a heavy chain encoded by a polynucleotide sequence comprising SEQ ID NO: 2150; a light chain encoded by a polynucleotide sequence comprising SEQ ID NO: 1994 and a heavy chain encoded by a polynucleotide sequence comprising SEQ ID NO: 2151; a light chain encoded by a polynucleotide sequence comprising SEQ ID NO: 1995 and a heavy chain encoded by a polynucleotide sequence comprising SEQ ID NO: 2152; a light chain encoded by a polynucleotide sequence comprising SEQ ID NO: 1996 and a heavy chain encoded by a polynucleotide sequence comprising SEQ ID NO: 2153; a light chain encoded by a polynucleotide sequence comprising SEQ ID NO: 1997 and a heavy chain encoded by a polynucleotide sequence comprising SEQ ID NO: 2154; a light chain encoded by a polynucleotide sequence comprising SEQ ID NO: 1998 and a heavy chain encoded by a polynucleotide sequence comprising SEQ ID NO: 2155; a light chain encoded by a polynucleotide sequence comprising SEQ ID NO: 1999 and a heavy chain encoded by a polynucleotide sequence comprising SEQ ID NO: 2156; a light chain encoded by a polynucleotide sequence comprising SEQ ID NO: 2000 and a heavy chain encoded by a polynucleotide sequence comprising SEQ ID NO: 2157; a light chain encoded by a polynucleotide sequence comprising SEQ ID NO: 2001 and a heavy chain encoded by a polynucleotide sequence comprising SEQ ID NO: 2158; a light chain encoded by a polynucleotide sequence comprising SEQ ID NO: 2002 and a heavy chain encoded by a polynucleotide sequence comprising SEQ ID NO: 2159; a light chain encoded by a polynucleotide sequence comprising SEQ ID NO: 2003 and a heavy chain encoded by a polynucleotide sequence comprising SEQ ID NO: 2160; a light chain encoded by a polynucleotide sequence comprising SEQ ID NO: 2004 and a heavy chain encoded by a polynucleotide sequence comprising SEQ ID NO: 2161; a light chain encoded by a polynucleotide sequence comprising SEQ ID NO: 2005 and a heavy chain encoded by a polynucleotide sequence comprising SEQ ID NO: 2162; a light chain encoded by a polynucleotide sequence comprising SEQ ID NO: 2006 and a heavy chain encoded by a polynucleotide sequence comprising SEQ ID NO: 2163; a light chain encoded by a polynucleotide sequence comprising SEQ ID NO: 2007 and a heavy chain encoded by a polynucleotide sequence comprising SEQ ID NO: 2164; a light chain encoded by a polynucleotide sequence comprising SEQ ID NO: 2008 and a heavy chain encoded by a polynucleotide sequence comprising SEQ ID NO: 2165; a light chain encoded by a polynucleotide sequence comprising SEQ ID NO: 2009 and a heavy chain encoded by a polynucleotide sequence comprising SEQ ID NO: 2166; a light chain encoded by a polynucleotide sequence comprising SEQ ID NO: 2010 and a heavy chain encoded by a polynucleotide sequence comprising SEQ ID NO: 2167; a light chain encoded by a polynucleotide sequence comprising SEQ ID NO: 2011 and a heavy chain encoded by a polynucleotide sequence comprising SEQ ID NO: 2168; a light chain encoded by a polynucleotide sequence comprising SEQ ID NO: 2012 and a heavy chain encoded by a polynucleotide sequence comprising SEQ ID NO: 2169; a light chain encoded by a polynucleotide sequence comprising SEQ ID NO: 2013 and a heavy chain encoded by a polynucleotide sequence comprising SEQ ID NO: 2170; a light chain encoded by a polynucleotide sequence comprising SEQ ID NO: 2014 and a heavy chain encoded by a polynucleotide sequence comprising SEQ ID NO: 2171; a light chain encoded by a polynucleotide sequence comprising SEQ ID NO: 2015 and a heavy chain encoded by a polynucleotide sequence comprising SEQ ID NO: 2172; a light chain encoded by a polynucleotide sequence comprising SEQ ID NO: 2016 and a heavy chain encoded by a polynucleotide sequence comprising SEQ ID NO: 2173; a light chain encoded by a polynucleotide sequence comprising SEQ ID NO: 2017 and a heavy chain encoded by a polynucleotide sequence comprising SEQ ID NO: 2174; a light chain encoded by a polynucleotide sequence comprising SEQ ID NO: 2018 and a heavy chain encoded by a polynucleotide sequence comprising SEQ ID NO: 2175; a light chain encoded by a polynucleotide sequence comprising SEQ ID NO: 2019 and a heavy chain encoded by a polynucleotide sequence comprising SEQ ID NO: 2176; a light chain encoded by a polynucleotide sequence comprising SEQ ID NO: 2020 and a heavy chain encoded by a polynucleotide sequence comprising SEQ ID NO: 2177; a light chain encoded by a polynucleotide sequence comprising SEQ ID NO: 2021 and a heavy chain encoded by a polynucleotide sequence comprising SEQ ID NO: 2178; a light chain encoded by a polynucleotide sequence comprising SEQ ID NO: 2022 and a heavy chain encoded by a polynucleotide sequence comprising SEQ ID NO: 2179; a light chain encoded by a polynucleotide sequence comprising SEQ ID NO: 2023 and a heavy chain encoded by a polynucleotide sequence comprising SEQ ID NO: 2180; a light chain encoded by a polynucleotide sequence comprising SEQ ID NO: 2024 and a heavy chain encoded by a polynucleotide sequence comprising SEQ ID NO: 2181; a light chain encoded by a polynucleotide sequence comprising SEQ ID NO: 2025 and a heavy chain encoded by a polynucleotide sequence comprising SEQ ID NO: 2182; a light chain encoded by a polynucleotide sequence comprising SEQ ID NO: 2026 and a heavy chain encoded by a polynucleotide sequence comprising SEQ ID NO: 2183; a light chain encoded by a polynucleotide sequence comprising SEQ ID NO: 2027 and a heavy chain encoded by a polynucleotide sequence comprising SEQ ID NO: 2184; a light chain encoded by a polynucleotide sequence comprising SEQ ID NO: 2028 and a heavy chain encoded by a polynucleotide sequence comprising SEQ ID NO: 2185; a light chain encoded by a polynucleotide sequence comprising SEQ ID NO: 2029 and a heavy chain encoded by a polynucleotide sequence comprising SEQ ID NO: 2186; a light chain encoded by a polynucleotide sequence comprising SEQ ID NO: 2030 and a heavy chain encoded by a polynucleotide sequence comprising SEQ ID NO: 2187; a light chain encoded by a polynucleotide sequence comprising SEQ ID NO: 2031 and a heavy chain encoded by a polynucleotide sequence comprising SEQ ID NO: 2188; a light chain encoded by a polynucleotide sequence comprising SEQ ID NO: 2032 and a heavy chain encoded by a polynucleotide sequence comprising SEQ ID NO: 2189; a light chain encoded by a polynucleotide sequence comprising SEQ ID NO: 2033 and a heavy chain encoded by a polynucleotide sequence comprising SEQ ID NO: 2190; a light chain encoded by a polynucleotide sequence comprising SEQ ID NO: 2034 and a heavy chain encoded by a polynucleotide sequence comprising SEQ ID NO: 2191; a light chain encoded by a polynucleotide sequence comprising SEQ ID NO: 2035 and a heavy chain encoded by a polynucleotide sequence comprising SEQ ID NO: 2192; a light chain encoded by a polynucleotide sequence comprising SEQ ID NO: 2036 and a heavy chain encoded by a polynucleotide sequence comprising SEQ ID NO: 2193; a light chain encoded by a polynucleotide sequence comprising SEQ ID NO: 2037 and a heavy chain encoded by a polynucleotide sequence comprising SEQ ID NO: 2194; a light chain encoded by a polynucleotide sequence comprising SEQ ID NO: 2038 and a heavy chain encoded by a polynucleotide sequence comprising SEQ ID NO: 2195; a light chain encoded by a polynucleotide sequence comprising SEQ ID NO: 2039 and a heavy chain encoded by a polynucleotide sequence comprising SEQ ID NO: 2196; a light chain encoded by a polynucleotide sequence comprising SEQ ID NO: 2040 and a heavy chain encoded by a polynucleotide sequence comprising SEQ ID NO: 2197; and a light chain encoded by a polynucleotide sequence comprising SEQ ID NO: 2041 and a heavy chain encoded by a polynucleotide sequence comprising SEQ ID NO: 2198.

[0226] In another aspect, the antigen binding protein comprises a full length light chain and a full length heavy chain as listed in one of the rows for one of the antibodies listed in TABLE 5. Some antigen binding proteins that are provided comprise a full length light chain and a full length heavy chain as listed in one of the rows for one of the antibodies listed in TABLE 5, except that one or both of the chains differs from the sequence specified in the table at only 1, 2, 3, 4, 5, 6, 7, 8, 9, 10, 11, 12, 13, 14 or 15 amino acid residues, wherein each such sequence difference is independently either a single amino acid deletion, insertion or substitution, with the deletions, insertions and/or substitutions resulting in no more than 1, 2, 3, 4, 5, 6, 7, 8, 9, 10, 11, 12, 13, 14 or 15 amino acid changes relative to the full length sequences specified in TABLE 5. In one embodiment the antigen binding protein comprises a full length light chain and/or a full length heavy chain from Table 5 with the N-terminal methionine deleted. In one embodiment the antigen binding protein comprises a full length light chain and/or a full length heavy chain from Table 5 with the C-terminal lysine deleted. Other antigen binding proteins also comprise a full length light chain and a full length heavy chain as listed in one of the rows for one of the antibodies listed in TABLE 5, except that one or both of the chains differs from the sequence specified in the table in that the light chain and/or heavy chain comprises or consists of a sequence of amino acids that has at least 70%, 75%, 80%, 85%, 90%, 95%, 96%, 97%, 98%, or 99% sequence identity to the amino acid sequences of the light chain or heavy chain sequences as specified in TABLE 5.

[0227] In another embodiment, the antigen binding protein consists of a just a light or a heavy chain polypeptide as set forth in TABLE 5.

[0228] In still another aspect, antigen-binding proteins containing the CDRs, variable domains and/or full length sequences listed in TABLES 3, 4A, 4B, and 5 is a monoclonal antibody, a chimeric antibody, a humanized antibody, a human antibody, a multispecific antibody, or an antibody fragment of the foregoing. In another embodiment, the antibody fragment of the isolated antigen-binding proteins provided herein is a Fab fragment, a Fab′ fragment, an F(ab′)₂ fragment, an Fv fragment, a diabody, or a scFv based upon an antibody with the sequences as listed in TABLE 5.

[0229] In yet another aspect, the isolated antigen-binding protein provided in TABLE 5 can be coupled to a labeling group and can compete for binding to GIPR with an antigen binding protein of one of the isolated antigen-binding proteins provided herein.

[0230] In another embodiment, antigen binding proteins are provided that compete with one of the exemplified antibodies or functional fragments described above for specific binding to a human GIPR (e.g., SEQ ID NO: 3141). Such antigen binding proteins may bind to the same epitope as one of the antigen binding proteins described herein, or to an overlapping epitope. Antigen binding proteins and fragments that compete with the exemplified antigen binding proteins are expected to show similar functional properties. The exemplified antigen binding proteins and fragments include those described above, including those with heavy and light chains, variable region domains and CDRs included in TABLES 3, 4A, 4B, and 5. Thus, as a specific example, the antigen binding proteins that are provided include those that compete with an antibody having:
[0231] all 6 of the CDRs listed for any antibody listed in TABLES 4A and 4B;
[0232] a VH and a VL listed for any antibody listed in TABLE 3; or
[0233] two light chains and two heavy chains as specified for any antibody listed in TABLE 5.

[0234] The antigen binding proteins that are provided include monoclonal antibodies that bind to GIPR. Monoclonal antibodies may be produced using any technique known in the art, e.g., by immortalizing spleen cells harvested from the transgenic animal after completion of the immunization schedule. The spleen cells can be immortalized using any technique known in the art, e.g., by fusing them with myeloma cells to produce hybridomas. Myeloma cells for use in hybridoma-producing fusion procedures preferably are non-antibody-producing, have high fusion efficiency, and enzyme deficiencies that render them incapable of growing in certain selective media which support the growth of only the desired fused cells (hybridomas). Examples of suitable cell lines for use in mouse fusions include Sp-20, P3-X63/Ag8, P3-X63-Ag8.653, NS1/1.Ag 4 1, Sp210-Ag14, FO, NSO/U, MPC-11, MPC11-X45-GTG 1.7 and S194/5XXO Bul; examples of cell lines used in rat fusions include R210.RCY3, Y3-Ag 1.2.3, IR983F and 4B210. Other cell lines useful for cell fusions are U-266, GM1500-GRG2, LICR-LON-HMy2 and UC729-6.

[0235] In some instances, a hybridoma cell line is produced by immunizing an animal (e.g., a transgenic animal having human immunoglobulin sequences) with a GIPR immunogen; harvesting spleen cells from the immunized animal; fusing the harvested spleen cells to a myeloma cell line, thereby generating hybridoma cells; establishing hybridoma cell lines from the hybridoma cells, and identifying a hybridoma cell line that produces an antibody that binds a GIPR polypeptide. Such hybridoma cell lines, and anti-GIPR monoclonal antibodies produced by them, are aspects of the present application.

[0236] Monoclonal antibodies secreted by a hybridoma cell line can be purified using any technique known in the art. Hybridomas or mAbs may be further screened to identify mAbs with particular properties, such as the ability to increase GIPR activity.

[0237] Chimeric and humanized antibodies based upon the foregoing sequences are also provided. Monoclonal antibodies for use as therapeutic agents may be modified in various ways prior to use. One example is a chimeric antibody, which is an antibody composed of protein segments from different antibodies that are covalently joined to produce functional immunoglobulin light or heavy chains or immunologically functional portions thereof. Generally, a portion of the heavy chain and/or light chain is identical with or homologous to a corresponding sequence in antibodies derived from a particular species or belonging to a particular antibody class or subclass, while the remainder of the chain(s) is/are identical with or homologous to a corresponding sequence in antibodies derived from another species or belonging to another antibody class or subclass. For methods relating to chimeric antibodies, see, for example, U.S. Pat. No. 4,816,567; and Morrison et al., 1985, Proc. Natl. Acad. Sci. USA 81:6851-6855, which are hereby incorporated by reference. CDR grafting is described, for example, in U.S. Pat. Nos. 6,180,370, 5,693,762, 5,693,761, 5,585,089, and 5,530,101.

[0238] Generally, the goal of making a chimeric antibody is to create a chimera in which the number of amino acids from the intended patient species is maximized. One example is the “CDR-grafted” antibody, in which the antibody comprises one or more complementarity determining regions (CDRs) from a particular species or belonging to a particular antibody class or subclass, while the remainder of the antibody chain(s) is/are identical with or homologous to a corresponding sequence in antibodies derived from another species or belonging to another antibody class or subclass. For use in humans, the variable region or selected CDRs from a rodent antibody often are grafted into a human antibody, replacing the naturally-occurring variable regions or CDRs of the human antibody.

[0239] One useful type of chimeric antibody is a “humanized” antibody. Generally, a humanized antibody is produced from a monoclonal antibody raised initially in a non-human animal. Certain amino acid residues in this monoclonal antibody, typically from non-antigen recognizing portions of the antibody, are modified to be homologous to corresponding residues in a human antibody of corresponding isotype. Humanization can be performed, for example, using various methods by substituting at least a portion of a rodent variable region for the corresponding regions of a human antibody (see, e.g., U.S. Pat. Nos. 5,585,089, and 5,693,762; Jones et al., 1986, Nature 321:522-525; Riechmann et al., 1988, Nature 332:323-27; Verhoeyen et al., 1988, Science 239:1534-1536).

[0240] In one aspect, the CDRs of the light and heavy chain variable regions of the antibodies provided herein are grafted to framework regions (FRs) from antibodies from the same, or a different, phylogenetic species. For example, the CDRs of the heavy and light chain variable regions V_{H}1, V_{H}2, V_{H}3, V_{H}4, V_{H}5, V_{H}6, V_{H}7, V_{H}8, V_{H}9, V_{H}10, V_{H}11, V_{H}12 and/or V_{L}1, and V_{L}2 can be grafted to consensus human FRs. To create consensus human FRs, FRs from several human heavy chain or light chain amino acid sequences may be aligned to identify a consensus amino acid sequence. In other embodiments, the FRs of a heavy chain or light chain disclosed herein are replaced with the FRs from a different heavy chain or light chain. In one aspect, rare amino acids in the FRs of the heavy and light chains of GIPR antibodies are not replaced, while the rest of the FR amino acids are replaced. A “rare amino acid” is a specific amino acid that is in a position in which this particular amino acid is not usually found in an FR. Alternatively, the grafted variable regions from the one heavy or light chain may be used with a constant region that is different from the constant region of that particular heavy or light chain as disclosed herein. In other embodiments, the grafted variable regions are part of a single chain Fv antibody.

[0241] In certain embodiments, constant regions from species other than human can be used along with the human variable region(s) to produce hybrid antibodies.

[0242] Fully human GIPR antibodies are also provided. Methods are available for making fully human antibodies specific for a given antigen without exposing human beings to the antigen (“fully human antibodies”). One specific means provided for implementing the production of fully human antibodies is the “humanization” of the mouse humoral immune system. Introduction of human immunoglobulin (Ig) loci into mice in which the endogenous Ig genes have been inactivated is one means of producing fully human monoclonal antibodies (mAbs) in mouse, an animal that can be immunized with any desirable antigen. Using fully human antibodies can minimize the immunogenic and allergic responses that can sometimes be caused by administering mouse or mouse-derived mAbs to humans as therapeutic agents.

[0243] Fully human antibodies can be produced by immunizing transgenic animals (usually mice) that are capable of producing a repertoire of human antibodies in the absence of endogenous immunoglobulin production. Antigens for this purpose typically have six or more contiguous amino acids, and optionally are conjugated to a carrier, such as a hapten. See, e.g., Jakobovits et al., 1993, Proc. Natl. Acad. Sci. USA 90:2551-2555; Jakobovits et al., 1993, Nature 362:255-258; and Bruggermann et al., 1993, Year in Immunol. 7:33. In one example of such a method, transgenic animals are produced by incapacitating the endogenous mouse immunoglobulin loci encoding the mouse heavy and light immunoglobulin chains therein, and inserting into the mouse genome large fragments of human genome DNA containing loci that encode human heavy and light chain proteins. Partially modified animals, which have less than the full complement of human immunoglobulin loci, are then cross-bred to obtain an animal having all of the desired immune system modifications. When administered an immunogen, these transgenic animals produce antibodies that are immunospecific for the immunogen but have human rather than murine amino acid sequences, including the variable regions. For further details of such methods, see, for example, WO96/33735 and WO94/02602. Additional methods relating to transgenic mice for making human antibodies are described in U.S. Pat. Nos. 5,545,807; 6,713,610; 6,673,986; 6,162,963; 5,545,807; 6,300,129; 6,255,458; 5,877,397; 5,874,299 and 5,545,806; in PCT publications WO91/10741, WO90/04036, and in EP 546073B1 and EP 546073A1.

[0244] The transgenic mice described above, referred to herein as “HuMab” mice, contain a human immunoglobulin gene minilocus that encodes unrearranged human heavy ([mu] and [gamma]) and [kappa] light chain immunoglobulin sequences, together with targeted mutations that inactivate the endogenous [mu] and [kappa] chain loci (Lonberg et al., 1994, Nature 368:856-859). Accordingly, the mice exhibit reduced expression of mouse IgM or [kappa] and in response to immunization, and the introduced human heavy and light chain transgenes undergo class switching and somatic mutation to generate high affinity human IgG [kappa] monoclonal antibodies (Lonberg et al., supra.; Lonberg and Huszar, 1995, Intern. Rev. Immunol. 13: 65-93; Harding and Lonberg, 1995, Ann. N.YAcad. Sci. 764:536-546). The preparation of HuMab mice is described in detail in Taylor et al., 1992, Nucleic Acids Research 20:6287-6295; Chen et al., 1993, International Immunology 5:647-656; Tuaillon et al., 1994, J Immunol. 152:2912-2920; Lonberg et al., 1994, Nature 368:856-859; Lonberg, 1994, Handbook of Exp. Pharmacology 113:49-101; Taylor et al., 1994, International Immunology 6:579-591; Lonberg and Huszar, 1995, Intern. Rev. Immunol. 13:65-93; Harding and Lonberg, 1995, Ann. N.Y Acad. Sci. 764:536-546; Fishwild et al., 1996, Nature Biotechnology 14:845-851; the foregoing references are hereby incorporated by reference in their entirety for all purposes. See, further U.S. Pat. Nos. 5,545,806; 5,569,825; 5,625,126; 5,633,425; 5,789,650; 5,877,397; 5,661,016; 5,814,318; 5,874,299; and 5,770,429; as well as U.S. Pat. No. 5,545,807; International Publication Nos. WO 93/1227; WO 92/22646; and WO 92/03918, the disclosures of all of which are hereby incorporated by reference in their entirety for all purposes. Technologies utilized for producing human antibodies in these transgenic mice are disclosed also in WO 98/24893, and Mendez et al., 1997, Nature Genetics 15:146-156, which are hereby incorporated by reference. For example, the HCo7 and HCo12 transgenic mice strains can be used to generate human monoclonal antibodies against GIPR. Further details regarding the production of human antibodies using transgenic mice are provided below.

[0245] Using hybridoma technology, antigen-specific human mAbs with the desired specificity can be produced and selected from the transgenic mice such as those described above. Such antibodies may be cloned and expressed using a suitable vector and host cell, or the antibodies can be harvested from cultured hybridoma cells.

[0246] Fully human antibodies can also be derived from phage-display libraries (as disclosed in Hoogenboom et al., 1991, J. Mol. Biol. 227:381; and Marks et al., 1991, J. Mol. Biol. 222:581). Phage display techniques mimic immune selection through the display of antibody repertoires on the surface of filamentous bacteriophage, and subsequent selection of phage by their binding to an antigen of choice. One such technique is described in PCT Publication No. WO 99/10494 (hereby incorporated by reference).

[0247] The GIPR binding protein can also be a variant, mimetic, derivative or oligomer based upon the structure of GIPR antigen binding proteins have the CDRs, variable regions and/or full length chains as described above.

[0248] In one embodiment, for instance, an antigen binding protein is a variant form of the antigen binding proteins disclosed above. For instance, some of the antigen binding proteins have one or more conservative amino acid substitutions in one or more of the heavy or light chains, variable regions or CDRs.

[0249] Naturally-occurring amino acids may be divided into classes based on common side chain properties:
[0250] 1) hydrophobic: norleucine, Met, Ala, Val, Leu, Ile;
[0251] 2) neutral hydrophilic: Cys, Ser, Thr, Asn, Gln;
[0252] 3) acidic: Asp, Glu;
[0253] 4) basic: His, Lys, Arg;
[0254] 5) residues that influence chain orientation: Gly, Pro; and
[0255] 6) aromatic: Trp, Tyr, Phe.

[0256] Conservative amino acid substitutions may involve exchange of a member of one of these classes with another member of the same class. Conservative amino acid substitutions may encompass non-naturally occurring amino acid residues, which are typically incorporated by chemical peptide synthesis rather than by synthesis in biological systems. These include peptidomimetics and other reversed or inverted forms of amino acid moieties.

[0257] Non-conservative substitutions may involve the exchange of a member of one of the above classes for a member from another class. Such substituted residues may be introduced into regions of the antibody that are homologous with human antibodies, or into the non-homologous regions of the molecule.

[0258] In making such changes, according to certain embodiments, the hydropathic index of amino acids may be considered. The hydropathic profile of a protein is calculated by assigning each amino acid a numerical value (“hydropathy index”) and then repetitively averaging these values along the peptide chain. Each amino acid has been assigned a hydropathic index on the basis of its hydrophobicity and charge characteristics. They are: isoleucine (+4.5); valine (+4.2); leucine (+3.8); phenylalanine (+2.8); cysteine/cystine (+2.5); methionine (+1.9); alanine (+1.8); glycine (−0.4); threonine (−0.7); serine (−0.8); tryptophan (−0.9); tyrosine (−1.3); proline (−1.6); histidine (−3.2); glutamate (−3.5); glutamine (−3.5); aspartate (−3.5); asparagine (−3.5); lysine (−3.9); and arginine (−4.5).

[0259] The importance of the hydropathic profile in conferring interactive biological function on a protein is understood in the art (see, e.g., Kyte et al., 1982, J Mol. Biol. 157:105-131). It is known that certain amino acids may be substituted for other amino acids having a similar hydropathic index or score and still retain a similar biological activity. In making changes based upon the hydropathic index, in certain embodiments, the substitution of amino acids whose hydropathic indices are within ±2 is included. In some aspects, those which are within ±1 are included, and in other aspects, those within ±0.5 are included.

[0260] It is also understood in the art that the substitution of like amino acids can be made effectively on the basis of hydrophilicity, particularly where the biologically functional protein or peptide thereby created is intended for use in immunological embodiments, as in the present case. In certain embodiments, the greatest local average hydrophilicity of a protein, as governed by the hydrophilicity of its adjacent amino acids, correlates with its immunogenicity and antigen-binding or immunogenicity, that is, with a biological property of the protein.

[0261] The following hydrophilicity values have been assigned to these amino acid residues: arginine (+3.0); lysine (+3.0); aspartate (+3.0+1); glutamate (+3.0±1); serine (+0.3); asparagine (+0.2); glutamine (+0.2); glycine (0); threonine (−0.4); proline (−0.5±1); alanine (−0.5); histidine (−0.5); cysteine (−1.0); methionine (−1.3); valine (−1.5); leucine (−1.8); isoleucine (−1.8); tyrosine (−2.3); phenylalanine (−2.5) and tryptophan (−3.4). In making changes based upon similar hydrophilicity values, in certain embodiments, the substitution of amino acids whose hydrophilicity values are within ±2 is included, in other embodiments, those which are within ±1 are included, and in still other embodiments, those within ±0.5 are included. In some instances, one may also identify epitopes from primary amino acid sequences on the basis of hydrophilicity. These regions are also referred to as “epitopic core regions.”

[0262] Exemplary conservative amino acid substitutions are set forth in Table 6.

TABLE 8
Conservative Amino Acid Substitutions

| Original Residue | Exemplary Substitutions |
|---|---|
| Ala | Ser |
| Arg | Lys |
| Asn | Gln, His |
| Asp | Glu |
| Cys | Ser |
| Gln | Asn |
| Glu | Asp |
| Gly | Pro |
| His | Asn, Gln |
| Ile | Leu, Val |
| Leu | Ile, Val |
| Lys | Arg, Gln, Glu |
| Met | Leu, Ile |
| Phe | Met, Leu, Tyr |
| Ser | Thr |
| Thr | Ser |
| Trp | Tyr |
| Tyr | Trp, Phe |
| Val | Ile, Leu |

[0263] A skilled artisan will be able to determine suitable variants of polypeptides as set forth herein using well-known techniques. One skilled in the art may identify suitable areas of the molecule that may be changed without destroying activity by targeting regions not believed to be important for activity. The skilled artisan also will be able to identify residues and portions of the molecules that are conserved among similar polypeptides. In further embodiments, even areas that may be important for biological activity or for structure may be subject to conservative amino acid substitutions without destroying the biological activity or without adversely affecting the polypeptide structure.

[0264] Additionally, one skilled in the art can review structure-function studies identifying residues in similar polypeptides that are important for activity or structure. In view of such a comparison, one can predict the importance of amino acid residues in a protein that correspond to amino acid residues important for activity or structure in similar proteins. One skilled in the art may opt for chemically similar amino acid substitutions for such predicted important amino acid residues.

[0265] One skilled in the art can also analyze the 3-dimensional structure and amino acid sequence in relation to that structure in similar polypeptides. In view of such information, one skilled in the art may predict the alignment of amino acid residues of an antibody with respect to its three dimensional structure. One skilled in the art may choose not to make radical changes to amino acid residues predicted to be on the surface of the protein, since such residues may be involved in important interactions with other molecules. Moreover, one skilled in the art may generate test variants containing a single amino acid substitution at each desired amino acid residue. These variants can then be screened using assays for GIPR activity, thus yielding information regarding which amino acids can be changed and which must not be changed. In other words, based on information gathered from such routine experiments, one skilled in the art can readily determine the amino acid positions where further substitutions should be avoided either alone or in combination with other mutations.

[0266] A number of scientific publications have been devoted to the prediction of secondary structure. See, Moult, 1996, Curr. Op. in Biotech. 7:422-427; Chou et al., 1974, Biochem. 13:222-245; Chou et al., 1974, Biochemistry 113:211-222; Chou et al., 1978, Adv. Enzymol. Relat. Areas Mol. Biol. 47:45-148; Chou et al., 1979, Ann. Rev. Biochem. 47:251-276; and Chou et al., 1979, Biophys. J. 26:367-384. Moreover, computer programs are currently available to assist with predicting secondary structure. One method of predicting secondary structure is based upon homology modeling. For example, two polypeptides or proteins that have a sequence identity of greater than 30%, or similarity greater than 40% can have similar structural topologies. The recent growth of the protein structural database (PDB) has provided enhanced predictability of secondary structure, including the potential number of folds within a polypeptide's or protein's structure. See, Holm et al., 1999, Nucl. Acid. Res. 27:244-247. It has been suggested (Brenner et al., 1997, Curr. Op. Struct. Biol. 7:369-376) that there are a limited number of folds in a given polypeptide or protein and that once a critical number of structures have been resolved, structural prediction will become dramatically more accurate.

[0267] Additional methods of predicting secondary structure include “threading” (Jones, 1997, Curr. Opin. Struct. Biol. 7:377-387; Sippl et al., 1996, Structure 4:15-19), “profile analysis” (Bowie et al., 1991, Science 253:164-170; Gribskov et al., 1990, Meth. Enzym. 183:146-159; Gribskov et al., 1987, Proc. Nat. Acad. Sci. 84:4355-4358), and “evolutionary linkage” (See, Holm, 1999, supra; and Brenner, 1997, supra).

[0268] In some embodiments, amino acid substitutions are made that: (1) reduce susceptibility to proteolysis, (2) reduce susceptibility to oxidation, (3) alter binding affinity for forming protein complexes, (4) alter ligand or antigen binding affinities, and/or (4) confer or modify other physicochemical or functional properties on such polypeptides. For example, single or multiple amino acid substitutions (in certain embodiments, conservative amino acid substitutions) may be made in the naturally-occurring sequence. Substitutions can be made in that portion of the antibody that lies outside the domain(s) forming intermolecular contacts). In such embodiments, conservative amino acid substitutions can be used that do not substantially change the structural characteristics of the parent sequence (e.g., one or more replacement amino acids that do not disrupt the secondary structure that characterizes the parent or native antigen binding protein). Examples of art-recognized polypeptide secondary and tertiary structures are described in Proteins, Structures and Molecular Principles (Creighton, Ed.), 1984, W. H. New York: Freeman and Company; Introduction to Protein Structure (Branden and Tooze, eds.), 1991, New York: Garland Publishing; and Thornton et al., 1991, Nature 354:105, which are each incorporated herein by reference.

[0269] Additional preferred antibody variants include cysteine variants wherein one or more cysteine residues in the parent or native amino acid sequence are deleted from or substituted with another amino acid (e.g., serine). Cysteine variants are useful, inter alia when antibodies must be refolded into a biologically active conformation. Cysteine variants may have fewer cysteine residues than the native antibody, and typically have an even number to minimize interactions resulting from unpaired cysteines.

[0270] The heavy and light chains, variable regions domains and CDRs that are disclosed can be used to prepare polypeptides that contain an antigen binding region that can specifically bind to GIPR. For example, one or more of the CDRs can be incorporated into a molecule (e.g., a polypeptide) covalently or noncovalently to make an immunoadhesion. An immunoadhesion may incorporate the CDR(s) as part of a larger polypeptide chain, may covalently link the CDR(s) to another polypeptide chain, or may incorporate the CDR(s) noncovalently. The CDR(s) enable the immunoadhesion to bind specifically to a particular antigen of interest (e.g., an GIPR polypeptide or epitope thereof).

[0271] Derivatives of the antigen binding proteins that are described herein are also provided. The derivatized antigen binding proteins can comprise any molecule or substance that imparts a desired property to the antibody or fragment, such as increased half-life in a particular use. The derivatized antigen binding protein can comprise, for example, a detectable (or labeling) moiety (e.g., a radioactive, colorimetric, antigenic or enzymatic molecule, a detectable bead (such as a magnetic or electrodense (e.g., gold) bead), or a molecule that binds to another molecule (e.g., biotin or streptavidin)), a therapeutic or diagnostic moiety (e.g., a radioactive, cytotoxic, or pharmaceutically active moiety), or a molecule that increases the suitability of the antigen binding protein for a particular use (e.g., administration to a subject, such as a human subject, or other in vivo or in vitro uses). Examples of molecules that can be used to derivatize an antigen binding protein include albumin (e.g., human serum albumin) and polyethylene glycol (PEG). Albumin-linked and PEGylated derivatives of antigen binding proteins can be prepared using techniques well known in the art. Certain antigen binding proteins include a pegylated single chain polypeptide as described herein. In one embodiment, the antigen binding protein is conjugated or otherwise linked to transthyretin (TTR) or a TTR variant. The TTR or TTR variant can be chemically modified with, for example, a chemical selected from the group consisting of dextran, poly(n-vinyl pyrrolidone), polyethylene glycols, propropylene glycol homopolymers, polypropylene oxide/ethylene oxide co-polymers, polyoxyethylated polyols and polyvinyl alcohols.

[0272] In some embodiments, the antigen binding protein comprises one or more labels. The term “labeling group” or “label” means any detectable label. Examples of suitable labeling groups include, but are not limited to, the following: radioisotopes or radionuclides (e.g., ³H, ¹⁴C, ¹⁵N, ³⁵S, ⁹⁰Y, ⁹⁹Tc, ¹¹¹In, ¹²⁵I, ¹³¹I), fluorescent groups (e.g., FITC, rhodamine, lanthanide phosphors), enzymatic groups (e.g., horseradish peroxidase, β-galactosidase, luciferase, alkaline phosphatase), chemiluminescent groups, biotinyl groups, or predetermined polypeptide epitopes recognized by a secondary reporter (e.g., leucine zipper pair sequences, binding sites for secondary antibodies, metal binding domains, epitope tags). In some embodiments, the labeling group is coupled to the antigen binding protein via spacer arms of various lengths to reduce potential steric hindrance. Various methods for labeling proteins are known in the art and may be used as is seen fit.

[0273] The term “effector group” means any group coupled to an antigen binding protein that acts as a cytotoxic agent. Examples for suitable effector groups are radioisotopes or radionuclides (e.g., ³H, ¹⁴C, ¹⁵N, ³⁵S, ⁹⁰Y, ⁹⁹Tc, ¹¹¹In, ¹²⁵I, ¹³¹I). Other suitable groups include toxins, therapeutic groups, or chemotherapeutic groups. Examples of suitable groups include calicheamicin, auristatins, geldanamycin and maytansine. In some embodiments, the effector group is coupled to the antigen binding protein via spacer arms of various lengths to reduce potential steric hindrance.

[0274] In general, labels fall into a variety of classes, depending on the assay in which they are to be detected: a) isotopic labels, which may be radioactive or heavy isotopes; b) magnetic labels (e.g., magnetic particles); c) redox active moieties; d) optical dyes; enzymatic groups (e.g. horseradish peroxidase, β-galactosidase, luciferase, alkaline phosphatase); e) biotinylated groups; and f) predetermined polypeptide epitopes recognized by a secondary reporter (e.g., leucine zipper pair sequences, binding sites for secondary antibodies, metal binding domains, epitope tags, etc.). In some embodiments, the labeling group is coupled to the antigen binding protein via spacer arms of various lengths to reduce potential steric hindrance. Various methods for labeling proteins are known in the art.

[0275] Specific labels include optical dyes, including, but not limited to, chromophores, phosphors and fluorophores, with the latter being specific in many instances. Fluorophores can be either “small molecule” fluores, or proteinaceous fluores.

[0276] By “fluorescent label” is meant any molecule that may be detected via its inherent fluorescent properties. Suitable fluorescent labels include, but are not limited to, fluorescein, rhodamine, tetramethylrhodamine, eosin, erythrosin, coumarin, methyl-coumarins, pyrene, Malacite green, stilbene, Lucifer Yellow, Cascade BlueJ, Texas Red, IAEDANS, EDANS, BODIPY FL, LC Red 640, Cy 5, Cy 5.5, LC Red 705, Oregon green, the Alexa-Fluor dyes (Alexa Fluor 350, Alexa Fluor 430, Alexa Fluor 488, Alexa Fluor 546, Alexa Fluor 568, Alexa Fluor 594, Alexa Fluor 633, Alexa Fluor 660, Alexa Fluor 680), Cascade Blue, Cascade Yellow and R-phycoerythrin (PE) (Molecular Probes, Eugene, OR), FITC, Rhodamine, and Texas Red (Pierce, Rockford, IL), Cy5, Cy5.5, Cy7 (Amersham Life Science, Pittsburgh, PA). Suitable optical dyes, including fluorophores, are described in Molecular Probes Handbook by Richard P. Haugland, hereby expressly incorporated by reference.

[0277] Suitable proteinaceous fluorescent labels also include, but are not limited to, green fluorescent protein, including a Renilla, Ptilosarcus, or Aequorea species of GFP (Chalfie et al., 1994, Science 263:802-805), EGFP (Clontech Labs., Inc., Genbank Accession Number U55762), blue fluorescent protein (BFP, Quantum Biotechnologies, Inc., Quebec, Canada; Stauber, 1998, Biotechniques 24:462-471; Heim et al., 1996, Curr. Biol. 6:178-182), enhanced yellow fluorescent protein (EYFP, Clontech Labs., Inc.), luciferase (Ichiki et al., 1993, J. Immunol. 150:5408-5417), R galactosidase (Nolan et al., 1988, Proc. Natl. Acad. Sci. U.S.A. 85:2603-2607) and Renilla (WO92/15673, WO95/07463, WO98/14605, WO98/26277, WO99/49019, U.S. Pat. No. 5,292,658, No. 5418155, No. 5683888, No. 5741668, No. 5777079, No. 5804387, No. 5874304, No. 5876995, No. 5925558).

[0278] Nucleic acids that encode for the antigen binding proteins described herein, or portions thereof, are also provided, including nucleic acids encoding one or both chains of an antibody, or a fragment, derivative, mutein, or variant thereof, polynucleotides encoding heavy chain variable regions or only CDRs, polynucleotides sufficient for use as hybridization probes, PCR primers or sequencing primers for identifying, analyzing, mutating or amplifying a polynucleotide encoding a polypeptide, anti-sense nucleic acids for inhibiting expression of a polynucleotide, and complementary sequences of the foregoing. The nucleic acids can be any length. They can be, for example, 5, 10, 15, 20, 25, 30, 35, 40, 45, 50, 75, 100, 125, 150, 175, 200, 250, 300, 350, 400, 450, 500, 750, 1,000, 1,500, 3,000, 5,000 or more nucleotides in length, and/or can comprise one or more additional sequences, for example, regulatory sequences, and/or be part of a larger nucleic acid, for example, a vector. The nucleic acids can be single-stranded or double-stranded and can comprise RNA and/or DNA nucleotides, and artificial variants thereof (e.g., peptide nucleic acids). Any variable region provided herein may be attached to these constant regions to form complete heavy and light chain sequences. However, it should be understood that these constant regions sequences are provided as specific examples only. In some embodiments, the variable region sequences are joined to other constant region sequences that are known in the art.

[0279] Nucleic acids encoding certain antigen binding proteins, or portions thereof (e.g., full length antibody, heavy or light chain, variable domain, or CDRH1, CDRH2, CDRH3, CDRL1, CDRL2, or CDRL3) may be isolated from B-cells of mice that have been immunized with GIPR or an immunogenic fragment thereof. The nucleic acid may be isolated by conventional procedures such as polymerase chain reaction (PCR). Phage display is another example of a known technique whereby derivatives of antibodies and other antigen binding proteins may be prepared. In one approach, polypeptides that are components of an antigen binding protein of interest are expressed in any suitable recombinant expression system, and the expressed polypeptides are allowed to assemble to form antigen binding proteins.

[0280] An aspect further provides nucleic acids that hybridize to other nucleic acids under particular hybridization conditions. Methods for hybridizing nucleic acids are well-known in the art. See, e.g., Current Protocols in Molecular Biology, John Wiley & Sons, N.Y. (1989), 6.3.1-6.3.6. As defined herein, a moderately stringent hybridization condition uses a prewashing solution containing 5× sodium chloride/sodium citrate (SSC), 0.5% SDS, 1.0 mM EDTA (pH 8.0), hybridization buffer of about 50% formamide, 6×SSC, and a hybridization temperature of 55° C. (or other similar hybridization solutions, such as one containing about 50% formamide, with a hybridization temperature of 42° C.), and washing conditions of 60° C., in 0.5×SSC, 0.1% SDS. A stringent hybridization condition hybridizes in 6×SSC at 45° C., followed by one or more washes in 0.1×SSC, 0.2% SDS at 68° C. Furthermore, one of skill in the art can manipulate the hybridization and/or washing conditions to increase or decrease the stringency of hybridization such that nucleic acids comprising nucleotide sequences that are at least 65%, 70%, 75%, 80%, 85%, 90%, 95%, 98% or 99% identical to each other typically remain hybridized to each other.

[0281] The basic parameters affecting the choice of hybridization conditions and guidance for devising suitable conditions are set forth by, for example, Sambrook, Fritsch, and Maniatis (2001, Molecular Cloning: A Laboratory Manual, Cold Spring Harbor Laboratory Press, Cold Spring Harbor, N.Y., supra; and Current Protocols in Molecular Biology, 1995, Ausubel et al., eds., John Wiley & Sons, Inc., sections 2.10 and 6.3-6.4), and can be readily determined by those having ordinary skill in the art based on, e.g., the length and/or base composition of the nucleic acid.

[0282] Changes can be introduced by mutation into a nucleic acid, thereby leading to changes in the amino acid sequence of a polypeptide (e.g., an antibody or antibody derivative) that it encodes. Mutations can be introduced using any technique known in the art. In one embodiment, one or more particular amino acid residues are changed using, for example, a site-directed mutagenesis protocol. In another embodiment, one or more randomly selected residues is changed using, for example, a random mutagenesis protocol. However it is made, a mutant polypeptide can be expressed and screened for a desired property.

[0283] Mutations can be introduced into a nucleic acid without significantly altering the biological activity of a polypeptide that it encodes. For example, one can make nucleotide substitutions leading to amino acid substitutions at non-essential amino acid residues. Alternatively, one or more mutations can be introduced into a nucleic acid that selectively changes the biological activity of a polypeptide that it encodes. For example, the mutation can quantitatively or qualitatively change the biological activity. Examples of quantitative changes include increasing, reducing or eliminating the activity. Examples of qualitative changes include changing the antigen specificity of an antibody. In one embodiment, a nucleic acid encoding any antigen binding protein described herein can be mutated to alter the amino acid sequence using molecular biology techniques that are well-established in the art.

[0284] Another aspect provides nucleic acid molecules that are suitable for use as primers or hybridization probes for the detection of nucleic acid sequences. A nucleic acid molecule can comprise only a portion of a nucleic acid sequence encoding a full-length polypeptide, for example, a fragment that can be used as a probe or primer or a fragment encoding an active portion of a polypeptide.

[0285] Probes based on the sequence of a nucleic acid can be used to detect the nucleic acid or similar nucleic acids, for example, transcripts encoding a polypeptide. The probe can comprise a label group, e.g., a radioisotope, a fluorescent compound, an enzyme, or an enzyme co-factor. Such probes can be used to identify a cell that expresses the polypeptide.

[0286] Another aspect provides vectors comprising a nucleic acid encoding a polypeptide or a portion thereof (e.g., a fragment containing one or more CDRs or one or more variable region domains). Examples of vectors include, but are not limited to, plasmids, viral vectors, non-episomal mammalian vectors and expression vectors, for example, recombinant expression vectors. The recombinant expression vectors can comprise a nucleic acid in a form suitable for expression of the nucleic acid in a host cell. The recombinant expression vectors include one or more regulatory sequences, selected on the basis of the host cells to be used for expression, which is operably linked to the nucleic acid sequence to be expressed. Regulatory sequences include those that direct constitutive expression of a nucleotide sequence in many types of host cells (e.g., SV40 early gene enhancer, Rous sarcoma virus promoter and cytomegalovirus promoter), those that direct expression of the nucleotide sequence only in certain host cells (e.g., tissue-specific regulatory sequences, see, Voss et al., 1986, Trends Biochem. Sci. 11287, Maniatis et al., 1987, Science 236:1237, incorporated by reference herein in their entireties), and those that direct inducible expression of a nucleotide sequence in response to particular treatment or condition (e.g., the metallothionin promoter in mammalian cells and the tet-responsive and/or streptomycin responsive promoter in both prokaryotic and eukaryotic systems (see, id.). It will be appreciated by those skilled in the art that the design of the expression vector can depend on such factors as the choice of the host cell to be transformed, the level of expression of protein desired, etc. The expression vectors can be introduced into host cells to thereby produce proteins or peptides, including fusion proteins or peptides, encoded by nucleic acids as described herein.

[0287] Another aspect provides host cells into which a recombinant expression vector has been introduced. A host cell can be any prokaryotic cell (for example, E. coli) or eukaryotic cell (for example, yeast, insect, or mammalian cells (e.g., CHO cells)). Vector DNA can be introduced into prokaryotic or eukaryotic cells via conventional transformation or transfection techniques. For stable transfection of mammalian cells, it is known that, depending upon the expression vector and transfection technique used, only a small fraction of cells may integrate the foreign DNA into their genome. In order to identify and select these integrants, a gene that encodes a selectable marker (e.g., for resistance to antibiotics) is generally introduced into the host cells along with the gene of interest. Preferred selectable markers include those which confer resistance to drugs, such as G418, hygromycin and methotrexate. Cells stably transfected with the introduced nucleic acid can be identified by drug selection (e.g., cells that have incorporated the selectable marker gene will survive, while the other cells die), among other methods.

[0288] Expression systems and constructs in the form of plasmids, expression vectors, transcription or expression cassettes that comprise at least one polynucleotide as described above are also provided herein, as well host cells comprising such expression systems or constructs.

[0289] The antigen binding proteins provided herein may be prepared by any of a number of conventional techniques. For example, GIPR antigen binding proteins may be produced by recombinant expression systems, using any technique known in the art. See, e.g., Monoclonal Antibodies, Hybridomas: A New Dimension in Biological Analyses, Kennet et al. (eds.) Plenum Press, New York (1980); and Antibodies: A Laboratory Manual, Harlow and Lane (eds.), Cold Spring Harbor Laboratory Press, Cold Spring Harbor, N.Y. (1988).

[0290] Antigen binding proteins can be expressed in hybridoma cell lines (e.g., in particular antibodies may be expressed in hybridomas) or in cell lines other than hybridomas. Expression constructs encoding the antibodies can be used to transform a mammalian, insect or microbial host cell. Transformation can be performed using any known method for introducing polynucleotides into a host cell, including, for example packaging the polynucleotide in a virus or bacteriophage and transducing a host cell with the construct by transfection procedures known in the art, as exemplified by U.S. Pat. Nos. 4,399,216; 4,912,040; 4,740,461; 4,959,455. The optimal transformation procedure used will depend upon which type of host cell is being transformed. Methods for introduction of heterologous polynucleotides into mammalian cells are well known in the art and include, but are not limited to, dextran-mediated transfection, calcium phosphate precipitation, polybrene mediated transfection, protoplast fusion, electroporation, encapsulation of the polynucleotide(s) in liposomes, mixing nucleic acid with positively-charged lipids, and direct microinjection of the DNA into nuclei.

[0291] Recombinant expression constructs typically comprise a nucleic acid molecule encoding a polypeptide comprising one or more of the following: one or more CDRs provided herein; a light chain constant region; a light chain variable region; a heavy chain constant region (e.g., C_{H}1, C_{H}2 and/or C_{H}3); and/or another scaffold portion of a GIPR antigen binding protein. These nucleic acid sequences are inserted into an appropriate expression vector using standard ligation techniques. In one embodiment, the heavy or light chain constant region is appended to the C-terminus of the anti-GIPR specific heavy or light chain variable region and is ligated into an expression vector. The vector is typically selected to be functional in the particular host cell employed (i.e., the vector is compatible with the host cell machinery, permitting amplification and/or expression of the gene can occur). In some embodiments, vectors are used that employ protein-fragment complementation assays using protein reporters, such as dihydrofolate reductase (see, for example, U.S. Pat. No. 6,270,964, which is hereby incorporated by reference). Suitable expression vectors can be purchased, for example, from Invitrogen Life Technologies or BD Biosciences (formerly “Clontech”). Other useful vectors for cloning and expressing the antibodies and fragments include those described in Bianchi and McGrew, 2003, Biotech. Biotechnol. Bioeng. 84:439-44, which is hereby incorporated by reference. Additional suitable expression vectors are discussed, for example, in Methods Enzymol., vol. 185 (D. V. Goeddel, ed.), 1990, New York: Academic Press.

[0292] Typically, expression vectors used in any of the host cells will contain sequences for plasmid maintenance and for cloning and expression of exogenous nucleotide sequences. Such sequences, collectively referred to as “flanking sequences” in certain embodiments will typically include one or more of the following nucleotide sequences: a promoter, one or more enhancer sequences, an origin of replication, a transcriptional termination sequence, a complete intron sequence containing a donor and acceptor splice site, a sequence encoding a leader sequence for polypeptide secretion, a ribosome binding site, a polyadenylation sequence, a polylinker region for inserting the nucleic acid encoding the polypeptide to be expressed, and a selectable marker element. Each of these sequences is discussed below.

[0293] Optionally, the vector may contain a “tag”-encoding sequence, i.e., an oligonucleotide molecule located at the 5′ or 3′ end of the GIPR antigen binding protein coding sequence; the oligonucleotide sequence encodes polyHis (such as hexaHis (SEQ ID NO: 3358)), or another “tag” such as FLAG®, HA (hemaglutinin influenza virus), or myc, for which commercially available antibodies exist. This tag is typically fused to the polypeptide upon expression of the polypeptide, and can serve as a means for affinity purification or detection of the GIPR antigen binding protein from the host cell. Affinity purification can be accomplished, for example, by column chromatography using antibodies against the tag as an affinity matrix. Optionally, the tag can subsequently be removed from the purified GIPR antigen binding protein by various means such as using certain peptidases for cleavage.

[0294] Flanking sequences may be homologous (i.e., from the same species and/or strain as the host cell), heterologous (i.e., from a species other than the host cell species or strain), hybrid (i.e., a combination of flanking sequences from more than one source), synthetic or native. As such, the source of a flanking sequence may be any prokaryotic or eukaryotic organism, any vertebrate or invertebrate organism, or any plant, provided that the flanking sequence is functional in, and can be activated by, the host cell machinery.

[0295] Flanking sequences useful in the vectors may be obtained by any of several methods well known in the art. Typically, flanking sequences useful herein will have been previously identified by mapping and/or by restriction endonuclease digestion and can thus be isolated from the proper tissue source using the appropriate restriction endonucleases. In some cases, the full nucleotide sequence of a flanking sequence may be known. Here, the flanking sequence may be synthesized using the methods described herein for nucleic acid synthesis or cloning.

[0296] Whether all or only a portion of the flanking sequence is known, it may be obtained using polymerase chain reaction (PCR) and/or by screening a genomic library with a suitable probe such as an oligonucleotide and/or flanking sequence fragment from the same or another species. Where the flanking sequence is not known, a fragment of DNA containing a flanking sequence may be isolated from a larger piece of DNA that may contain, for example, a coding sequence or even another gene or genes. Isolation may be accomplished by restriction endonuclease digestion to produce the proper DNA fragment followed by isolation using agarose gel purification, Qiagen® column chromatography (Chatsworth, CA), or other methods known to the skilled artisan. The selection of suitable enzymes to accomplish this purpose will be readily apparent to one of ordinary skill in the art.

[0297] An origin of replication is typically a part of those prokaryotic expression vectors purchased commercially, and the origin aids in the amplification of the vector in a host cell. If the vector of choice does not contain an origin of replication site, one may be chemically synthesized based on a known sequence, and ligated into the vector. For example, the origin of replication from the plasmid pBR322 (New England Biolabs, Beverly, MA) is suitable for most gram-negative bacteria, and various viral origins (e.g., SV40, polyoma, adenovirus, vesicular stomatitus virus (VSV), or papillomaviruses such as HPV or BPV) are useful for cloning vectors in mammalian cells. Generally, the origin of replication component is not needed for mammalian expression vectors (for example, the SV40 origin is often used only because it also contains the virus early promoter).

[0298] A transcription termination sequence is typically located 3′ to the end of a polypeptide coding region and serves to terminate transcription. Usually, a transcription termination sequence in prokaryotic cells is a G-C rich fragment followed by a poly-T sequence. While the sequence is easily cloned from a library or even purchased commercially as part of a vector, it can also be readily synthesized using methods for nucleic acid synthesis such as those described herein.

[0299] A selectable marker gene encodes a protein necessary for the survival and growth of a host cell grown in a selective culture medium. Typical selection marker genes encode proteins that (a) confer resistance to antibiotics or other toxins, e.g., ampicillin, tetracycline, or kanamycin for prokaryotic host cells; (b) complement auxotrophic deficiencies of the cell; or (c) supply critical nutrients not available from complex or defined media. Specific selectable markers are the kanamycin resistance gene, the ampicillin resistance gene, and the tetracycline resistance gene. Advantageously, a neomycin resistance gene may also be used for selection in both prokaryotic and eukaryotic host cells.

[0300] Other selectable genes may be used to amplify the gene that will be expressed. Amplification is the process wherein genes that are required for production of a protein critical for growth or cell survival are reiterated in tandem within the chromosomes of successive generations of recombinant cells. Examples of suitable selectable markers for mammalian cells include dihydrofolate reductase (DHFR) and promoterless thyrnidine kinase genes. Mammalian cell transformants are placed under selection pressure wherein only the transformants are uniquely adapted to survive by virtue of the selectable gene present in the vector. Selection pressure is imposed by culturing the transformed cells under conditions in which the concentration of selection agent in the medium is successively increased, thereby leading to the amplification of both the selectable gene and the DNA that encodes another gene, such as an antigen binding protein that binds GIPR polypeptide. As a result, increased quantities of a polypeptide such as an antigen binding protein are synthesized from the amplified DNA.

[0301] A ribosome-binding site is usually necessary for translation initiation of mRNA and is characterized by a Shine-Dalgamo sequence (prokaryotes) or a Kozak sequence (eukaryotes). The element is typically located 3′ to the promoter and 5′ to the coding sequence of the polypeptide to be expressed.

[0302] In some cases, such as where glycosylation is desired in a eukaryotic host cell expression system, one may manipulate the various pre- or pro-sequences to improve glycosylation or yield. For example, one may alter the peptidase cleavage site of a particular signal peptide, or add prosequences, which also may affect glycosylation. The final protein product may have, in the −1 position (relative to the first amino acid of the mature protein), one or more additional amino acids incident to expression, which may not have been totally removed. For example, the final protein product may have one or two amino acid residues found in the peptidase cleavage site, attached to the amino-terminus. Alternatively, use of some enzyme cleavage sites may result in a slightly truncated form of the desired polypeptide, if the enzyme cuts at such area within the mature polypeptide.

[0303] Expression and cloning will typically contain a promoter that is recognized by the host organism and operably linked to the molecule encoding the GIPR antigen binding protein. Promoters are untranscribed sequences located upstream (i.e., 5′) to the start codon of a structural gene (generally within about 100 to 1000 bp) that control transcription of the structural gene. Promoters are conventionally grouped into one of two classes: inducible promoters and constitutive promoters. Inducible promoters initiate increased levels of transcription from DNA under their control in response to some change in culture conditions, such as the presence or absence of a nutrient or a change in temperature. Constitutive promoters, on the other hand, uniformly transcribe a gene to which they are operably linked, that is, with little or no control over gene expression. A large number of promoters, recognized by a variety of potential host cells, are well known. A suitable promoter is operably linked to the DNA encoding heavy chain or light chain comprising a GIPR antigen binding protein by removing the promoter from the source DNA by restriction enzyme digestion and inserting the desired promoter sequence into the vector.

[0304] Suitable promoters for use with yeast hosts are also well known in the art. Yeast enhancers are advantageously used with yeast promoters. Suitable promoters for use with mammalian host cells are well known and include, but are not limited to, those obtained from the genomes of viruses such as polyoma virus, fowlpox virus, adenovirus (such as Adenovirus 2), bovine papilloma virus, avian sarcoma virus, cytomegalovirus, retroviruses, hepatitis-B virus, and Simian Virus 40 (SV40). Other suitable mammalian promoters include heterologous mammalian promoters, for example, heat-shock promoters and the actin promoter.

[0305] An enhancer sequence may be inserted into the vector to increase transcription of DNA encoding light chain or heavy chain comprising a GIPR antigen binding protein by higher eukaryotes. Enhancers are cis-acting elements of DNA, usually about 10-300 bp in length, that act on the promoter to increase transcription. Enhancers are relatively orientation and position independent, having been found at positions both 5′ and 3′ to the transcription unit. Several enhancer sequences available from mammalian genes are known (e.g., globin, elastase, albumin, alpha-feto-protein and insulin). Typically, however, an enhancer from a virus is used. The SV40 enhancer, the cytomegalovirus early promoter enhancer, the polyoma enhancer, and adenovirus enhancers known in the art are exemplary enhancing elements for the activation of eukaryotic promoters. While an enhancer may be positioned in the vector either 5′ or 3′ to a coding sequence, it is typically located at a site 5′ from the promoter. A sequence encoding an appropriate native or heterologous signal sequence (leader sequence or signal peptide) can be incorporated into an expression vector, to promote extracellular secretion of the antibody. The choice of signal peptide or leader depends on the type of host cells in which the antibody is to be produced, and a heterologous signal sequence can replace the native signal sequence. Examples of signal peptides that are functional in mammalian host cells include the following: the signal sequence for interleukin-7 (IL-7) described in U.S. Pat. No. 4,965,195; the signal sequence for interleukin-2 receptor described in Cosman et al., 1984, Nature 312:768; the interleukin-4 receptor signal peptide described in EP Patent No. 0367 566; the type I interleukin-1 receptor signal peptide described in U.S. Pat. No. 4,968,607; the type II interleukin-1 receptor signal peptide described in EP Patent No. 0 460 846.

[0306] In one embodiment the leader sequence comprises SEQ ID NO: 3157 (MDMRVPAQLL GLLLLWLRGA Rc) which is encoded by SEQ ID NO: 3158 (atggacatga gagtgcctgc acagctgctg ggcctgctgc tgctgtggct gagaggcgcc agatgc). In another embodiment the leader sequence comprises SEQ ID NO: 3159 (MAWALLLLTL LTQGTGSWA) which is encoded by SEQ ID NO: 3160 (atggcctggg ctctgctgct cctcaccctc ctcactcagg gcacagggtc ctgggcc).

[0307] The expression vectors that are provided may be constructed from a starting vector such as a commercially available vector. Such vectors may or may not contain all of the desired flanking sequences. Where one or more of the flanking sequences described herein are not already present in the vector, they may be individually obtained and ligated into the vector. Methods used for obtaining each of the flanking sequences are well known to one skilled in the art.

[0308] After the vector has been constructed and a nucleic acid molecule encoding light chain, a heavy chain, or a light chain and a heavy chain comprising a GIPR antigen binding sequence has been inserted into the proper site of the vector, the completed vector may be inserted into a suitable host cell for amplification and/or polypeptide expression. The transformation of an expression vector for an antigen-binding protein into a selected host cell may be accomplished by well-known methods including transfection, infection, calcium phosphate co-precipitation, electroporation, microinjection, lipofection, DEAE-dextran mediated transfection, or other known techniques. The method selected will in part be a function of the type of host cell to be used. These methods and other suitable methods are well known to the skilled artisan, and are set forth, for example, in Sambrook et al., 2001, supra.

[0309] A host cell, when cultured under appropriate conditions, synthesizes an antigen binding protein that can subsequently be collected from the culture medium (if the host cell secretes it into the medium) or directly from the host cell producing it (if it is not secreted). The selection of an appropriate host cell will depend upon various factors, such as desired expression levels, polypeptide modifications that are desirable or necessary for activity (such as glycosylation or phosphorylation) and ease of folding into a biologically active molecule.

[0310] Mammalian cell lines available as hosts for expression are well known in the art and include, but are not limited to, immortalized cell lines available from the American Type Culture Collection (ATCC), including but not limited to Chinese hamster ovary (CHO) cells, HeLa cells, baby hamster kidney (BHK) cells, monkey kidney cells (COS), human hepatocellular carcinoma cells (e.g., Hep G2), and a number of other cell lines. In certain embodiments, cell lines may be selected through determining which cell lines have high expression levels and constitutively produce antigen binding proteins with GIPR binding properties. In another embodiment, a cell line from the B cell lineage that does not make its own antibody but has a capacity to make and secrete a heterologous antibody can be selected.

[0311] In one embodiment, the present invention is directed to an antigen binding protein produced by a cell expressing one or more of the polynucleotides identified in Tables 2, 3, 4, and 5.

[0312] In one aspect, a GIPR binding protein is administered for chronic treatment. In another aspect, the binding proteins are administered for acute therapy.

[0313] Pharmaceutical compositions that comprise a GIPR antigen binding protein are also provided and can be utilized in any of the preventive and therapeutic methods disclosed herein. In an embodiment, a therapeutically effective amount of one or a plurality of the antigen binding proteins and a pharmaceutically acceptable diluent, carrier, solubilizer, emulsifier, preservative, and/or adjuvant are also provided. Acceptable formulation materials are nontoxic to recipients at the dosages and concentrations employed.

[0314] In certain embodiments, the pharmaceutical composition may contain formulation materials for modifying, maintaining or preserving, for example, the pH, osmolarity, viscosity, clarity, color, isotonicity, odor, sterility, stability, rate of dissolution or release, adsorption or penetration of the composition. In such embodiments, suitable formulation materials include, but are not limited to, amino acids (such as glycine, glutamine, asparagine, arginine or lysine); antimicrobials; antioxidants (such as ascorbic acid, sodium sulfite or sodium hydrogen-sulfite); buffers (such as borate, bicarbonate, Tris-HCl, citrates, phosphates or other organic acids); bulking agents (such as mannitol or glycine); chelating agents (such as ethylenediamine tetraacetic acid (EDTA)); complexing agents (such as caffeine, polyvinylpyrrolidone, beta-cyclodextrin or hydroxypropyl-beta-cyclodextrin); fillers; monosaccharides; disaccharides; and other carbohydrates (such as glucose, mannose or dextrins); proteins (such as serum albumin, gelatin or immunoglobulins); coloring, flavoring and diluting agents; emulsifying agents; hydrophilic polymers (such as polyvinylpyrrolidone); low molecular weight polypeptides; salt-forming counterions (such as sodium); preservatives (such as benzalkonium chloride, benzoic acid, salicylic acid, thimerosal, phenethyl alcohol, methylparaben, propylparaben, chlorhexidine, sorbic acid or hydrogen peroxide); solvents (such as glycerin, propylene glycol or polyethylene glycol); sugar alcohols (such as mannitol or sorbitol); suspending agents; surfactants or wetting agents (such as pluronics, PEG, sorbitan esters, polysorbates such as polysorbate 20, polysorbate, triton, tromethamine, lecithin, cholesterol, tyloxapal); stability enhancing agents (such as sucrose or sorbitol); tonicity enhancing agents (such as alkali metal halides, preferably sodium or potassium chloride, mannitol sorbitol); delivery vehicles; diluents; excipients and/or pharmaceutical adjuvants. REMINGTON'S PHARMACEUTICAL SCIENCES, 18” Edition, (A.R. Genrmo, ed.), 1990, Mack Publishing Company provides additional details and options for suitable agents that can be incorporated into the pharmaceutical compositions.

[0315] In certain embodiments, the optimal pharmaceutical composition will be determined by one skilled in the art depending upon, for example, the intended route of administration, delivery format and desired dosage. See, for example, REMINGTON'S PHARMACEUTICAL SCIENCES, supra. In certain embodiments, such compositions may influence the physical state, stability, rate of in vivo release and rate of in vivo clearance of the antigen binding proteins disclosed. In certain embodiments, the primary vehicle or carrier in a pharmaceutical composition may be either aqueous or non-aqueous in nature. For example, a suitable vehicle or carrier may be water for injection or physiological saline solution. In certain embodiments, GIPR antigen binding protein compositions may be prepared for storage by mixing the selected composition having the desired degree of purity with optional formulation agents (REMINGTON'S PHARMACEUTICAL SCIENCES, supra) in the form of a lyophilized cake or an aqueous solution. Further, in certain embodiments, the GIPR antigen binding protein may be formulated as a lyophilizate using appropriate excipients such as sucrose.

[0316] The pharmaceutical compositions can be selected for parenteral delivery. Alternatively, the compositions may be selected for inhalation or for delivery through the digestive tract, such as orally. Preparation of such pharmaceutically acceptable compositions is within the skill of the art.

[0317] The formulation components are present preferably in concentrations that are acceptable to the site of administration. In certain embodiments, buffers are used to maintain the composition at physiological pH or at a slightly lower pH, typically within a pH range of from about 5 to about 8.

[0318] When parenteral administration is contemplated, the therapeutic compositions may be provided in the form of a pyrogen-free, parenterally acceptable aqueous solution comprising the desired human GIPR antigen binding protein in a pharmaceutically acceptable vehicle. A particularly suitable vehicle for parenteral injection is sterile distilled water in which the GIPR antigen binding protein is formulated as a sterile, isotonic solution, properly preserved. In certain embodiments, the preparation can involve the formulation of the desired molecule with an agent, such as injectable microspheres, bio-erodible particles, polymeric compounds (such as polylactic acid or polyglycolic acid), beads or liposomes, that may provide controlled or sustained release of the product which can be delivered via depot injection. In certain embodiments, hyaluronic acid may also be used, having the effect of promoting sustained duration in the circulation. In certain embodiments, implantable drug delivery devices may be used to introduce the desired antigen binding protein.

[0319] Certain pharmaceutical compositions are formulated for inhalation. In some embodiments, GIPR antigen binding proteins are formulated as a dry, inhalable powder. In specific embodiments, GIPR antigen binding protein inhalation solutions may also be formulated with a propellant for aerosol delivery. In certain embodiments, solutions may be nebulized. Pulmonary administration and formulation methods therefore are further described in International Patent Application No. PCT/US94/001875, which is incorporated by reference and describes pulmonary delivery of chemically modified proteins. Some formulations can be administered orally. GIPR antigen binding proteins that are administered in this fashion can be formulated with or without carriers customarily used in the compounding of solid dosage forms such as tablets and capsules. In certain embodiments, a capsule may be designed to release the active portion of the formulation at the point in the gastrointestinal tract when bioavailability is maximized and pre-systemic degradation is minimized. Additional agents can be included to facilitate absorption of the GIPR antigen binding protein. Diluents, flavorings, low melting point waxes, vegetable oils, lubricants, suspending agents, tablet disintegrating agents, and binders may also be employed.

[0320] Some pharmaceutical compositions comprise an effective quantity of one or a plurality of GIPR antigen binding proteins in a mixture with non-toxic excipients that are suitable for the manufacture of tablets. By dissolving the tablets in sterile water, or another appropriate vehicle, solutions may be prepared in unit-dose form. Suitable excipients include, but are not limited to, inert diluents, such as calcium carbonate, sodium carbonate or bicarbonate, lactose, or calcium phosphate; or binding agents, such as starch, gelatin, or acacia; or lubricating agents such as magnesium stearate, stearic acid, or talc.

[0321] Additional pharmaceutical compositions will be evident to those skilled in the art, including formulations involving GIPR binding proteins in sustained- or controlled-delivery formulations. Techniques for formulating a variety of other sustained- or controlled-delivery means, such as liposome carriers, bio-erodible microparticles or porous beads and depot injections, are also known to those skilled in the art. See, for example, International Patent Application No. PCT/US93/00829, which is incorporated by reference and describes controlled release of porous polymeric microparticles for delivery of pharmaceutical compositions. Sustained-release preparations may include semipermeable polymer matrices in the form of shaped articles, e.g., films, or microcapsules. Sustained release matrices may include polyesters, hydrogels, polylactides (as disclosed in U.S. Pat. No. 3,773,919 and European Patent Application Publication No. EP 058481, each of which is incorporated by reference), copolymers of L-glutamic acid and gamma ethyl-L-glutamate (Sidman et al., 1983, Biopolymers 2:547-556), poly (2-hydroxyethyl-inethacrylate) (Langer et al., 1981, J Biomed. Mater. Res. 15:167-277 and Langer, 1982, Chem. Tech. 12:98-105), ethylene vinyl acetate (Langer et al., 1981, supra) or poly-D(−)-3-hydroxybutyric acid (European Patent Application Publication No. EP 133,988). Sustained release compositions may also include liposomes that can be prepared by any of several methods known in the art. See, e.g., Eppstein et al., 1985, Proc. Natl. Acad. Sci. U.S.A. 82:3688-3692; European Patent Application Publication Nos. EP 036,676; EP 088,046 and EP 143,949, incorporated by reference.

[0322] Pharmaceutical compositions used for in vivo administration are typically provided as sterile preparations. Sterilization can be accomplished by filtration through sterile filtration membranes. When the composition is lyophilized, sterilization using this method may be conducted either prior to or following lyophilization and reconstitution. Compositions for parenteral administration can be stored in lyophilized form or in a solution. Parenteral compositions generally are placed into a container having a sterile access port, for example, an intravenous solution bag or vial having a stopper pierceable by a hypodermic injection needle.

[0323] In certain formulations, an antigen binding protein has a concentration of at least 10 mg/mL, 20 mg/mL, 30 mg/mL, 40 mg/mL, 50 mg/mL, 60 mg/mL, 70 mg/mL, 80 mg/mL, 90 mg/mL, 100 mg/mL or 150 mg/mL. In one embodiment, a pharmaceutical composition comprises the antigen binding protein, a buffer and polysorbate. In other embodiments, the pharmaceutical composition comprises an antigen binding protein, a buffer, sucrose and polysorbate. An example of a pharmaceutical composition is one containing 50-100 mg/mL of antigen binding protein, 5-20 mM sodium acetate, 5-10% w/v sucrose, and 0.002-0.008% w/v polysorbate. Certain, compositions, for instance, contain 65-75 mg/mL of an antigen binding protein in 9-11 mM sodium acetate buffer, 8-10% w/v sucrose, and 0.005-0.006% w/v polysorbate. The pH of certain such formulations is in the range of 4.5-6. Other formulations have a pH of 5.0-5.5 (e.g., pH of 5.0, 5.2 or 5.4).

[0324] Once the pharmaceutical composition has been formulated, it may be stored in sterile vials as a solution, suspension, gel, emulsion, solid, crystal, or as a dehydrated or lyophilized powder. Such formulations may be stored either in a ready-to-use form or in a form (e.g., lyophilized) that is reconstituted prior to administration. Kits for producing a single-dose administration unit are also provided. Certain kits contain a first container having a dried protein and a second container having an aqueous formulation. In certain embodiments, kits containing single and multi-chambered pre-filled syringes (e.g., liquid syringes and lyosyringes) are provided. The therapeutically effective amount of a GIPR antigen binding protein-containing pharmaceutical composition to be employed will depend, for example, upon the therapeutic context and objectives. One skilled in the art will appreciate that the appropriate dosage levels for treatment will vary depending, in part, upon the molecule delivered, the indication for which the GIPR antigen binding protein is being used, the route of administration, and the size (body weight, body surface or organ size) and/or condition (the age and general health) of the patient. In certain embodiments, the clinician may titer the dosage and modify the route of administration to obtain the optimal therapeutic effect.

[0325] Dosing frequency will depend upon the pharmacokinetic parameters of the particular GIPR antigen binding protein in the formulation used. Typically, a clinician administers the composition until a dosage is reached that achieves the desired effect. The composition may therefore be administered as a single dose, or as two or more doses (which may or may not contain the same amount of the desired molecule) over time, or as a continuous infusion via an implantation device or catheter. Appropriate dosages may be ascertained through use of appropriate dose-response data. In certain embodiments, the antigen binding proteins can be administered to patients throughout an extended time period. In certain embodiments, the antigen binding protein is dosed every two weeks, every month, every two months, every three months, every four months, every five months, or every six months.

[0326] The route of administration of the pharmaceutical composition is in accord with known methods, e.g., orally, through injection by intravenous, intraperitoneal, intracerebral (intra-parenchymal), intracerebroventricular, intramuscular, intra-ocular, intraarterial, intraportal, or intralesional routes; by sustained release systems or by implantation devices. In certain embodiments, the compositions may be administered by bolus injection or continuously by infusion, or by implantation device.

[0327] The composition also may be administered locally via implantation of a membrane, sponge or another appropriate material onto which the desired molecule has been absorbed or encapsulated. In certain embodiments, where an implantation device is used, the device may be implanted into any suitable tissue or organ, and delivery of the desired molecule may be via diffusion, timed-release bolus, or continuous administration.

[0328] It also may be desirable to use GIPR antigen binding protein pharmaceutical compositions according to the disclosed ex vivo. In such instances, cells, tissues or organs that have been removed from the patient are exposed to GIPR antigen binding protein pharmaceutical compositions after which the cells, tissues and/or organs are subsequently implanted back into the patient.

[0329] A physician will be able to select an appropriate treatment indication and target lipid levels depending on the individual profile of a particular patient. One well-accepted standard for guiding treatment of hyperlipidemia is the Third Report of the National Cholesterol Education Program (NCEP) Expert Panel on Detection, Evaluation, and Treatment of the High Blood Cholesterol in Adults (Adult Treatment Panel III) Final Report, National Institutes of Health, NIH Publication No. 02-5215 (2002), the printed publication of which is hereby incorporated by reference in its entirety.

[0330] The efficacy of a particular dose can be assessed by reference to biomarkers or improvement in certain physiological parameters. Examples of suitable biomarkers include, the ratio of free cholesterol to plasma lipid, free cholesterol to membrane protein, phospatidylcholine to sphingomyelin, or HDL-C levels.

[0331] Also provided herein are compositions comprising a GIPR antigen binding protein and one or more additional therapeutic agents, as well as methods in which such agents are administered concurrently or sequentially with a GIPR antigen binding protein for use in the preventive and therapeutic methods disclosed herein. The one or more additional agents can be co-formulated with a GIPR antigen binding protein or can be co-administered with a GIPR antigen binding protein. In general, the therapeutic methods, compositions and compounds may also be employed in combination with other therapeutics in the treatment of various disease states, with the additional agents being administered concurrently.

[0332] A “GLP-1 receptor agonist” refers to compounds having GLP-1 receptor activity. Such exemplary compounds include exendins, exendin agonists, GLP-1(7-37), GLP-1(7-37) analogs, GLP-1(7-37) agonists, and the like. The terms “GLP-1 receptor agonist” and “GLP-1 receptor agonist compound” have the same meaning.

[0333] The term “exendin” includes naturally occurring (or synthetic versions of naturally occurring) exendin peptides that are found in the salivary secretions of the Gila monster. Exendins of particular interest include exendin-3 and exendin-4. The exendins, exendin analogs, and exendin agonists for use in the methods described herein may optionally be amidated, and may also be in an acid form, pharmaceutically acceptable salt form, or any other physiologically active form of the molecule.

[0334] In one embodiment, the GLP-1 receptor agonist is GLP-1(7-37) or a GLP-1(7-37) analog.

[0335] In one embodiment, administration of at least one GLP-1 receptor agonist in combination with administration of at least one GIPR antagonist provides sustained beneficial effects of at least one symptom of a metabolic disorder.

[0336] In one embodiment, the therapeutically effective amounts of a GLP-1 receptor agonist and a GIPR antagonist are synergistically effective amounts.

[0337] Exendin-4 (HGEGTFTSDLSKQMEEEAVRLFIEWLKNGGPSSGAPPPS-NH₂ (SEQ ID NO: 3163)) is a peptide found in the saliva of the Gila monster, Heloderma suspectum; and exendin-3 (HSDGTFTSDLSKQMEEEAVRLFIEWLKNGGPSSGAPPPS-NH2 (SEQ ID NO: 3164)) is a peptide found in the saliva of the beaded lizard, Heloderma horridum. Exendins have some amino acid sequence similarity to some members of the glucagon-like peptide (GLP) family. For example, exendin-4 has about 53% sequence identity with glucagon-like peptide-1(GLP-1)(7-37) (HAEGTFTSDVSSYLEGQAAKEFIAWLVKGRG (SEQ ID NO: 3182)). However, exendin-4 is transcribed from a distinct gene, not the Gila monster homolog of the mammalian proglucagon gene from which GLP-1 is expressed. Additionally, exendin-4 is not an analog of GLP-1(7-37) because the structure of synthetic exendin-4 peptide was not created by sequential modification of the structure of GLP-1. Nielsen et al., Current Opinion in Investigational Drugs, 4(4):401-405 (2003).

[0338] “Exendin analog” refers to peptides which elicit a biological activity of an exendin reference peptide, preferably having a potency equal to or better than the exendin reference peptide (e.g., exendin-4), or within five orders of magnitude (plus or minus) of potency compared to the exendin reference peptide, when evaluated by art-known measures such as receptor binding and/or competition studies as described, e.g., by Hargrove et al., Regulatory Peptides, 141:113-119 (2007), the disclosure of which is incorporated by reference herein. Preferably, the exendin analogs will bind in such assays with an affinity of less than 1 pM, and more preferably with an affinity of less than 3 nM, less than 1 nM, or less than 0.1 nM. The term “exendin analog” may also be referred to as “exendin agonist”. In a preferred embodiment, the exendin analog is an exendin-4 analog.

[0339] Exemplary exendins and exendin analogs exendin-4 (SEQ ID NO: 3163), exendin-3 (SEQ ID NO: 3164); Leu¹⁴-exendin-4 (SEQ ID NO: 3165); Leu¹⁴,Phe²⁵-exendin-4 (SEQ ID NO: 3166); Leu¹⁴,Ala¹⁹,Phe²⁵-exendin-4 (SEQ ID NO: 3167); exendin-4(1-30) (SEQ ID NO: 3168); Leu¹⁴-exendin-4(1-30) (SEQ ID NO: 3169); Leu¹⁴,Phe²⁵-exendin-4(1-30) (SEQ ID NO: 3170): Leu¹⁴,Ala¹⁹,Phe²⁵-exendin-4(1-30) (SEQ ID NO: 3171); exendin-4(1-28) (SEQ ID NO: 3172); Leu¹⁴-exendin-4(1-28) (SEQ ID NO: 3173); Leu¹⁴,Phe²⁵-exendin-4(1-28) (SEQ ID NO: 3174); Leu¹⁴,Ala¹⁹,Phe²⁵-exendin-4 (1-28) (SEQ ID NO: 3175); Leu¹⁴,Lys^{17,20},Ala¹⁹,Glu²¹,Phe²⁵,Gln²⁸-exendin-4 (SEQ ID NO. 3176); Leu¹⁴,Lys^{17,20},Ala¹⁹Glu²¹,Gln²⁸-exendin-4 (SEQ ID NO: 3177); Phe⁴,Leu¹⁴,Gln²⁸,Lys³³,Glu³⁴, Ile^{35,36},Ser³⁷-exendin-4(1-37) (SEQ ID NO: 3178); Phe⁴,Leu¹⁴,Lys^{17,20},Ala¹⁹,Glu²¹,Gln²⁸-exendin-4 (SEQ ID NO: 3179); Val¹¹,Ile¹³,Leu¹⁴,Ala¹⁶,Lys²¹,Phe²⁵-exendin-4 (SEQ ID NO: 3180); and exendin-4-Lys⁴⁰ (SEQ ID NO: 3181).

[0340] In one embodiment, the GLP-1 receptor agonist compound is an exendin-4 analog that has at least 80% sequence identity to exendin-4 (SEQ ID NO: 3163); at least 85% sequence identity to exendin-4 (SEQ ID NO: 3163); at least 90% sequence identity to exendin-4 (SEQ ID NO: 3163); or at least 95% sequence identity to exendin-4 (SEQ ID NO: 3163).

[0341] “GLP-1(7-37) analogs” refers to peptides which elicit a biological activity similar to that of GLP-1(7-37), when evaluated by art-known measures such as receptor binding assays or in vivo blood glucose assays as described, e.g., by Hargrove et al., Regulatory Peptides, 141:113-119 (2007), the disclosure of which is incorporated by reference herein. In one embodiment, the term “GLP-1(7-37) analog” refers to a peptide that has an amino acid sequence with 1, 2, 3, 4, 5, 6, 7 or 8 amino acid substitutions, insertions, deletions, or a combination of two or more thereof, when compared to the amino acid sequence of GLP-1(7-37). In some embodiments a simple nomenclature is used to describe the GLP-1 receptor agonist, e.g., [Gly⁸] GLP-1(7-37) designates an analogue of GLP-1(7-37) wherein the naturally occurring Ala in position 8 has been substituted with Gly. Alternatively, the same molecule can be designated as “GLP1 A2G” or even more simply as “A2G”. Similarly, [Gly⁸, His³, Gly³⁰] GLP-1 (7-37) can be written as “GLP1 A2G/E3H/R30G” or as “A2G/E3H/R30G”.

[0342] Exemplary GLP-1(7-37) and GLP-1(7-37) analogs include In one embodiment, the GLP-1 receptor agonist is GLP-1(7-37) or a GLP-1(7-37) analog. In one embodiment, the GLP-1 receptor agonist is selected from the group consisting of GLP-1(7-37) (SEQ ID NO: 3182);
[0343] Exendin-4 (SEQ ID NO: 3163);
[0344] Exendin-3 (SEQ ID NO: 3164);
[0345] Leu¹⁴-exendin-4 (SEQ ID NO: 3165);
[0346] Leu¹⁴,Phe²⁵-exendin-4 (SEQ ID NO: 3166);
[0347] Leu¹⁴,Ala¹⁹,Phe²⁵-exendin-4 (SEQ ID NO: 3167);
[0348] exendin-4(1-30) (SEQ ID NO: 3168);
[0349] Leu¹⁴-exendin-4(1-30) (SEQ ID NO: 3169);
[0350] Leu¹⁴,Phe²⁵exendin-4(1-30) (SEQ ID NO: 3170);
[0351] Leu¹⁴,Ala¹⁹Phe²⁵-exendin-4(1-30) (SEQ ID NO: 3171);
[0352] exendin-4(1-28) (SEQ ID NO: 3172);
[0353] Leu¹⁴-exendin-4(1-28) (SEQ ID NO: 3173);
[0354] Leu¹⁴,Phe²⁵-exendin-4(1-28) (SEQ ID NO: 3174);
[0355] Leu¹⁴, Ala¹⁹,Phe²⁵-exendin-4 (1-28) (SEQ ID NO: 3175);
[0356] Leu¹⁴,Lys^{17,20},Ala¹⁹,Glu²¹,Phe²⁵,Gln²⁸-exendin-4 (SEQ ID NO: 3176);
[0357] Leu¹⁴,Lys^{17,20},Ala¹⁹,Glu²¹,Gln²⁸-exendin-4 (SEQ ID NO: 3177);
[0358] Phe⁴Leu¹⁴,Gln²⁸,Lys³³,Glu³⁴, Ile^{35,36},Ser³⁷-exendin-4(1-37) (SEQ ID NO: 3178);
[0359] Phe⁴,Leu¹⁴,Lys^{17,20},Ala¹⁹,Glu²¹,Gln²⁸-exendin-4 (SEQ ID NO: 3179);
[0360] Val¹¹, Ile¹³,Leu¹⁴,Ala¹⁶,Lys²¹,Phe²⁵-exendin-4 (SEQ ID NO: 3180);
[0361] exendin-4-Lys⁴⁰ (SEQ ID NO: 3181);
[0362] GLP-1(7-37) (SEQ ID NO: 3182);
[0363] HXaa₈EGTFTSDVSSYLEXaa₂₂Xaa₂₃AAKEFIXaa₃₀WLXaa₃₃Xaa₃₄G Xaa₃₆Xaa₃₇; wherein Xaa₈ is A, V, or G; Xaa₂₂ is G, K, or E; Xaa₂₃ is Q or K; Naa₃₀ is A or E; Xaa₃₃ is V or K; Xaa₃₄ is K, N. or R; Xaa₃₆ is R or G; and Xaa₃₇ is G, H, P, or absent (SEQ ID NO: 3183);

(SEQ ID NO: 3184)
Arg³⁴-GLP-1(7-37);
(SEQ ID NO: 3185)
Glu³⁰-GLP-1(7-37);
(SEQ ID NO: 3186)
Lys²²-GLP-1(7-37);
(SEQ ID NO: 3187)
Gly^{8,36}, Glu²²-GLP-1(7-37);
(SEQ ID NO: 3188)
Val⁸, Glu²², Gly³⁶-GLP-1(7-37);
(SEQ ID NO: 3189)
Gly^{8,36}, Glu²², Lys³³, Asn³⁴-GLP-1(7-37);
(SEQ ID NO: 3190)
Val⁸, Glu²², Lys³³, Asn³⁴, Gly³⁶-GLP-1(7-37);
(SEQ ID NO: 3191)
Gly^{3,36}, Glu²², Pro³⁷-GLP-1(7-37);
(SEQ ID NO: 3192)
Val⁸, Glu²², Gly³⁶, Pro³⁷-GLP-1(7-37);
(SEQ ID NO: 3193)
Gly^{8,36}, Glu²², Lys³³, Asn³⁴, Pro³⁷-GLP-1(7-37);
(SEQ ID NO: 3194)
Val⁸, Glu²², Lys³³, Asn³⁴, Gly³⁶, Pro³⁷-GLP-1(7-37);
(SEQ ID NO: 3195)
Gly^{8,36}, Glu²²-GLP-1(7-36);
(SEQ ID NO: 3196)
Val⁸, Glu²², Gly³⁶-GLP-1(7-36);
(SEQ ID NO: 3197)
Val⁸, Glu²², Asn³⁴, Gly³⁶-GLP-1(7-36);
(SEQ ID NO: 3198)
Gly^{8,36}, Glu²², Asn34-GLP-1(7-36);
(SEQ ID NO: 3199)
GLP-1 analog;
(SEQ ID NO: 3200)
GLP-1 analog;
(SEQ ID NO: 3201)
[Gly^{8,36}, Glu²²]GLP-1(7-37);
(SEQ ID NO: 3202)
HAEGTFTSDVSSYLEGQAAKEFIAWLVKGRG;
(SEQ ID NO: 3203)
AEGTFTSDVSSYLEGQAAKEFIAWLVKGRG;
(SEQ ID NO: 3204)
EGTFTSDVSSYLEGQAAKEFIAWLVKGRG;
(SEQ ID NO: 3205)
HGEGTFTSDVSSYLEGQAAKEFIAWLVKGRG;
(SEQ ID NO: 3206)
HGEGTFTSDVSSYLEGQAAKEFIAWLVKGR;
(SEQ ID NO: 3207)
HLEGTFTSDVSSYLEGQAAKEFIAWLVKGRG;
(SEQ ID NO: 3208)
HGEGTFTSDLSKQMEEEAVRLF;
(SEQ ID NO: 3209)
HGEGTFTSDLSKQMEEEAVRLFI;
(SEQ ID NO: 3210)
HGEGTFTSDVSSYLEGQAAKEFIAWLVKGGG;
(SEQ ID NO: 3211)
HGEGTFTSDLSKQMEEEAVRLAAQAAQQGGG;
(SEQ ID NO: 3212)
HSEGTFTSDVSSYLEEQAAKEFIAWLVKGGG;
(SEQ ID NO: 3213)
HSQGTFTSDVSSYLEEQAAKEFIAWLVKGGG;
(SEQ ID NO: 3214)
HGDGTFTSDVSSYLEEQAAKEFIAWLVKGGG;
(SEQ ID NO: 3215)
HSDGTFTSDVSSYLEEQAAKEFIAWLVKGGG;
(SEQ ID NO: 3216)
HSEGTFTSDVSSYLEEQAAKEFIEWLVKGGG;
(SEQ ID NO: 3217)
HSQGTFTSDVSSYLEEQAAKEFIEWLVKGGG;
(SEQ ID NO: 3218)
HGDGTFTSDVSSYLEEQAAKEFIEWLVKGGG;
(SEQ ID NO: 3219)
HSDGTFTSDVSSYLEEQAAKEFIEWLVKGGG;
(SEQ ID NO: 3220)
HGEGTFTSDVSSYLEEQAAKEFIAWLKNGGG;
(SEQ ID NO: 3221)
HSEGTFTSDVSSYLEEQAAKEFIAWLKNGGG;
(SEQ ID NO: 3222)
HSQGTFTSDVSSYLEEQAAKEFIAWLKNGGG;
(SEQ ID NO: 3223)
HGDGTFTSDVSSYLEEQAAKEFIAWLKNGGG;
(SEQ ID NO: 3224)
HSDGTFTSDVSSYLEEQAAKEFIAWLKNGGG;
(SEQ ID NO: 3225)
HSEGTFTSDVSSYLEEQAAKEFIEWLKNGGG;
(SEQ ID NO: 3226)
HSQGTFTSDVSSYLEEQAAKEFIEWLKNGGG;
(SEQ ID NO: 3227)
HGDGTFTSDVSSYLEEQAAKEFIEWLKNGGG;
(SEQ ID NO: 3228)
HSDGTFTSDVSSYLEEQAAKEFIEWLKNGGG;
(SEQ ID NO: 3229)
HGEGTFTSDVSSYLEEQAAKEFIEWLKNEGG;
(SEQ ID NO: 3230)
HSEGTFTSDVSSYLEEQAAKEFIEWLKNEGG;
(SEQ ID NO: 3231)
HGEGTFTSDVSSYLEEQAAKEFIEWLKNPGG;
(SEQ ID NO: 3232)
HSEGTFTSDVSSYLEEQAAKEFIEWLKNPGG;
(SEQ ID NO: 3233)
HGEGTFTSDVSSYLEEQAAKEFIEWLKNQGG;
(SEQ ID NO: 3234)
HSEGTFTSDVSSYLEEQAAKEFIEWLKNQGG;
(SEQ ID NO: 3235)
HGEGTFTSDVSSYLEEQAAKEFIEWLKNTGG;
(SEQ ID NO: 3236)
HSEGTFTSDVSSYLEEQAAKEFIEWLKNTGG;
(SEQ ID NO: 3237)
HGEGTFTSDVSSYLEEQAAKEFIEWLKNVGG;
(SEQ ID NO: 3238)
HSEGTFTSDVSSYLEEQAAKEFIEWLKNVGG;
(SEQ ID NO: 3239)
HGEGTFTSDVSSYLEEQAAKEFIEWLKQGGG;
(SEQ ID NO: 3240)
HSEGTFTSDVSSYLEEQAAKEFIEWLKQGGG;
(SEQ ID NO: 3241)
HGEGTFTSDVSSYLEEQAAKEFIAWLVKGGG;
(SEQ ID NO: 3242)
HGEGTFTSDVSXYLEEQAAKEFIAWLVKGGG;
(SEQ ID NO: 3243)
HVEGTFTSDVSSYLEGQAAKEFIAWLVKGGG;
(SEQ ID NO: 3244)
HSEGTFTSDVSSYLEGQAAKEFIAWLVKGGG;
(SEQ ID NO: 3245)
HGQGTFTSDVSSYLEGQAAKEFIAWLVKGGG;
(SEQ ID NO: 3246)
HVQGTFTSDVSSYLEGQAAKEFIAWLVKGGG;
(SEQ ID NO: 3247)
HSQGTFTSDVSSYLEGQAAKEFIAWLVKGGG;
(SEQ ID NO: 3248)
HVDGTFTSDVSSYLEGQAAKEFIAWLVKGGG;
(SEQ ID NO: 3249)
HGHGTFTSDVSSYLEGQAAKEFIAWLVKGGG;
(SEQ ID NO: 3250)
HVHGTFTSDVSSYLEGQAAKEFIAWLVKGGG;
(SEQ ID NO: 3251)
HSHGTFTSDVSSYLEGQAAKEFIAWLVKGGG;
(SEQ ID NO: 3252)
HGDGTFTSDVSSYLEGQAAKEFIAWLVKGGG;
(SEQ ID NO: 3253)
HSDGTFTSDVSSYLEGQAAKEFIAWLVKGGG;
(SEQ ID NO: 3254)
HGEGTFTSDVSSYLEEQAAKEFIEWLKNGGG;
(SEQ ID NO: 3255)
HGEGTFTSDVSSYLEEQAAKEFIEWLVKGGG;
(SEQ ID NO: 3256)
HGEGTFTSDYSSYLEEQAAKEFIEWLKNGGG;
(SEQ ID NO: 3257)
HGEGTFTSEVSSYLEGQAAKEFIEWLKNGGG;
(SEQ ID NO: 3258)
HSEGTFTSDLSKQMEEEAVRLFAAQAAQQGGG;
(SEQ ID NO: 3259)
HSQGTFTSDLSKQMEEEAVRLFAAQAAQQGGG;
(SEQ ID NO: 3260)
HGDGTFTSDLSKQMEEEAVRLFAAQAAQQGGG;
(SEQ ID NO: 3261)
HSDGTFTSDLSKQMEEEAVRLFAAQAAQQGGG;
(SEQ ID NO: 3262)
HGEGTFTSDLSKQMEEEAVRLFAAQAAQQGGG;
(SEQ ID NO: 3263)
HGEGTFTSDLSKQMEEEAVRLFIEWLKNGG;
(SEQ ID NO: 3264)
HGEGTFTSDVSSYLEGEAVRLFIEWLKNGG;
(SEQ ID NO: 3265)
HGEGTFTSDLSKQMEEEAVRLFIEWLKNGGPSSGAPPPS;
(SEQ ID NO: 3266)
HGEGTFTSDVSSYLEGEAVRLFIEWLKNGGPSSGAPPPS;
(SEQ ID NO: 3267)
HHGEGTFTSDVSSYLEEQAAKEFIEWLKNGGG;
(SEQ ID NO: 3268)
HHGEGTFTSDVSSYLEEQAAKEFIEWLKDGGG;
(SEQ ID NO: 3269)
HHGEGTFTSDVSSYLEEQAAKEFIEWLKQGGG;
(SEQ ID NO: 3270)
HHGEGTFTSDVSSYLEEQAAKEFIEWLKNQGG;
(SEQ ID NO: 3271)
HHGEGTFTSDVSSYLEEQAAKEFIEWLKNTGG;
(SEQ ID NO: 3272)
HHGEGTFTSDVSSYLEEQAAKEFIEWLKNVGG;
(SEQ ID NO: 3273)
HHGEGTFTSDVSSYLEEQAAKEFIEWLKNPGG;
(SEQ ID NO: 3274)
HHGEGTFTSDVSSYLEEQAAKEFIEWLKNEGG;
(SEQ ID NO: 3275)
HGAGTFTSDVSSYLEGQAAKEFIAWLVKG;
(SEQ ID NO: 3276)
HGDGTFTSDVSSYLEGQAAKEFIAWLVKG;
(SEQ ID NO: 3277)
HGLGTFTSDVSSYLEGQAAKEFIAWLVKG;
(SEQ ID NO: 3278)
HGVGTFTSDVSSYLEGQAAKEFIAWLVKG;
(SEQ ID NO: 3279)
HGFGTFTSDVSSYLEGQAAKEFIAWLVKG;
(SEQ ID NO: 3280)
HGYGTFTSDVSSYLEGQAAKEFIAWLVKG;
(SEQ ID NO: 3281)
HGTGTFTSDVSSYLEGQAAKEFIAWLVKG;
(SEQ ID NO: 3282)
HGNGTFTSDVSSYLEGQAAKEFIAWLVKG;
(SEQ ID NO: 3283)
HGHGTFTSDVSSYLEGQAAKEFIAWLVKG;
(SEQ ID NO: 3284)
HGKGTFTSDVSSYLEGQAAKEFIAWLVKG;
(SEQ ID NO: 3285)
HGIGTFTSDVSSYLEGQAAKEFIAWLVKG;
(SEQ ID NO: 3286)
HGWGTFTSDVSSYLEGQAAKEFIAWLVKG;
(SEQ ID NO: 3287)
HGPGTFTSDVSSYLEGQAAKEFIAWLVKG;
(SEQ ID NO: 3288)
HGSGTFTSDVSSYLEGQAAKEFIAWLVKG;
(SEQ ID NO: 3289)
HGRGTFTSDVSSYLEGQAAKEFIAWLVKG;
(SEQ ID NO: 3290)
AHGEGTFTSDVSSYLEGQAAKEFIAWLVKG;
(SEQ ID NO: 3291)
GHGEGTFTSDVSSYLEGQAAKEFIAWLVKG;
(SEQ ID NO: 3292)
HHGEGTFTSDVSSYLEGQAAKEFIAWLVKG;
(SEQ ID NO: 3293)
HHEGTFTSDVSSYLEGQAAKEFIAWLVKG;
(SEQ ID NO: 3294)
HGEATFTSDVSSYLEGQAAKEFIAWLVKG;
(SEQ ID NO: 3295)
HGESTFTSDVSSYLEGQAAKEFIAWLVKG;
(SEQ ID NO: 3296)
HGEVTFTSDVSSYLEGQAAKEFIAWLVKG;
(SEQ ID NO: 3297)
HGEKTFTSDVSSYLEGQAAKEFIAWLVKG;
(SEQ ID NO: 3298)
HGEETFTSDVSSYLEGQAAKEFIAWLVKG;
(SEQ ID NO: 3299)
HGEGTFTSDVSSYLEGQAAKEFIAWLVKG;
(SEQ ID NO: 3300)
HVEGTFTSDVSSYLEGQAAKEFIAWLVKGRG;
(SEQ ID NO: 3301)
HSEGTFTSDVSSYLEGQAAKEFIAWLVKGRG;
and
(SEQ ID NO: 3302)
HGQGTFTSDVSSYLEGQAAKEFIAWLVKGRG.

[0364] Peptidyl linkers. The linker moiety, if present, can be “peptidyl” in nature (i.e., made up of amino acids linked together by peptide bonds) and made up in length, preferably, of from 1 up to about 40 amino acid residues, more preferably, of from 10 up to about 30 amino acid residues, and most preferably of from 10 to about 20 amino acid residues. The amino acid residues in the linker are from among the twenty canonical amino acids, more preferably, glycine, alanine, proline, asparagine, glutamine, and/or serine. Even more preferably, a peptidyl linker is made up of a majority of amino acids that are sterically unhindered, such as glycine, serine, and alanine linked by a peptide bond. It is also desirable that, if present, a peptidyl linker be selected that avoids rapid proteolytic turnover in circulation in vivo. Some of these amino acids may be glycosylated, as is well understood by those in the art. For example, a useful linker sequence constituting a sialylation site is X₁X₂NX₄X₅G (SEQ ID NO: 3337), wherein X₁, X₂,X₄ and X₅ are each independently any amino acid residue. Preferred linkers include polyglycines, polyserines, and polyalanines, or combinations of any of these. Some exemplary peptidyl linkers are poly(Gly)₁₋₈ (SEQ ID NO: 3360), particularly (Gly)₃, (Gly)₄ (SEQ ID NO: 3327), (Gly)₅ (SEQ ID NO:3338) and (Gly)₇ (SEQ ID NO:3339), as well as, GlySer and poly(Gly)₄Ser (SEQ ID NO: 3361), such as “L15” (GGGGSGGGGSGGGGS; SEQ ID NO:3340), poly(Gly-Ala)₂₋₄ (SEQ ID NO: 3362) and poly(Ala)₁₋₈ (SEQ ID NO: 3363). Other specific examples of peptidyl linkers include (Gly)₅Lys (SEQ ID NO:3341), and (Gly)₅LysArg (SEQ ID NO:3342). Other examples of useful peptidyl linkers are: Other examples of useful peptidyl linkers are:

(SEQ ID NO: 3343)
(Gly)₃Lys(Gly)₄;
(SEQ ID NO: 3344)
(Gly)₃ AsnGlySer(Gly)₂;
(SEQ ID NO: 3345)
(Gly)₃Cys(Gly)₄;
and
(SEQ ID NO: 3357)
GlyProAsnGlyGly.

[0365] To explain the above nomenclature, for example, (Gly)₃Lys(Gly)₄ means Gly-Gly-Gly-Lys-Gly-Gly-Gly-Gly (SEQ ID NO:3346). Other combinations of Gly and Ala are also useful.

[0366] Other preferred linkers are those identified herein as “L5” (GGGGS; or “G4S”; SEQ ID NO:3347), “L10” (GGGGSGGGGS; SEQ ID NO:3348); “L20” (GGGGSGGGGSGGGGSGGGGS; SEQ ID NO:3349); “L25” (GGGGSGGGGSGGGGSGGGGSGGGGS; SEQ ID NO:3350) and any linkers used in the working examples hereinafter.

[0367] In some embodiments of the compositions of this invention, which comprise a peptide linker moiety, acidic residues, for example, glutamate or aspartate residues, are placed in the amino acid sequence of the linker moiety. Examples include the following peptide linker sequences: (Gly₃Ser)₂ (SEQ ID NO: 3303), (Gly₄Ser)₂ (SEQ ID NO: 3304), (Gly₃Ser)₃ (SEQ ID NO: 3305), (Gly₄Ser)₃ (SEQ ID NO: 3306), (Gly₃Ser)₄ (SEQ ID NO: 3307), (Gly₄Ser)₄ (SEQ ID NO: 3308), (Gly₃Ser)₅ (SEQ ID NO: 3309), (Gly₄Ser)₅ (SEQ ID NO: 3310), (Gly₃Ser)₆ (SEQ ID NO: 3311), (Gly₄Ser)₆ (SEQ ID NO: 3359), GGEGGG (SEQ ID NO:3312);

(SEQ ID NO: 3313)
GGEEEGGG;
(SEQ ID NO: 3314)
GEEEG;
(SEQ ID NO: 3315)
GEEE;
(SEQ ID NO: 3316)
GGDGGG;
(SEQ ID NO: 3317)
GGDDDGG;
(SEQ ID NO: 3318)
GDDDG;
(SEQ ID NO: 3319)
GDDD;
(SEQ ID NO: 3320)
GGGGSDDSDEGSDGEDGGGGS;
(SEQ ID NO: 3321)
WEWEW;
(SEQ ID NO: 3322)
FEFEF;
(SEQ ID NO: 3323)
EEEWWW;
(SEQ ID NO: 3324)
EEEFFF;
(SEQ ID NO: 3325)
WWEEEWW;
(SEQ ID NO: 3326)
FFEEEFF.
(SEQ ID NO: 3327)
GGGG;
(SEQ ID NO: 3328)
GGGGSGGGG;
(SEQ ID NO: 3329)
GAPAPAPAPG;
(SEQ ID NO: 3330)
GGGGAGGGGAGGGG;
(SEQ ID NO: 3331)
GAPAPAPAPAPAPG;
(SEQ ID NO: 3332)
GAPAPAPAPAPAPAPAPG;
(SEQ ID NO: 3333)
GGGGAGGGGAGGGGAGGGG;
(SEQ ID NO: 3334)
GAPAPAPAPAPAPAPAPAPAPG;
(SEQ ID NO: 3335)
GSGSATGGSGSVASSGSGSATGS;
and
(SEQ ID NO: 3336)
GSGSATGGSGSVASSGSGSATHL.

[0368] In other embodiments, the linker constitutes a phosphorylation site, e.g., X1X2YX4X5G (SEQ ID NO:3351), wherein X1, X2, X4, and X5 are each independently any amino acid residue; X1X2SX4X5G (SEQ ID NO:3352), wherein X1, X2,X4 and X5 are each independently any amino acid residue; or X1X2TX4X5G (SEQ ID NO:3353), wherein X1, X2, X4 and X5 are each independently any amino acid residue.

[0369] The linkers shown here are exemplary; peptidyl linkers within the scope of this invention may be much longer and may include other residues. A peptidyl linker can contain, e.g., a cysteine, another thiol, or nucleophile for conjugation with a half-life extending moiety. In another embodiment, the linker contains a cysteine for conjugation to maleimide, iodoacetaamide or thioester, functionalized half-life extending moiety.

[0370] Another useful peptidyl linker is a large, flexible linker comprising a random Gly/Ser/Thr sequence, for example: GSGSATGGSGSTASSGSGSATH (SEQ ID NO:3356) or HGSGSATGGSGSTASSGSGSAT (SEQ ID NO:3354), that is estimated to be about the size of a 1 kDa PEG molecule. Alternatively, a useful peptidyl linker may be comprised of amino acid sequences known in the art to form rigid helical structures (e.g., Rigid linker: −AEAAAKEAAAKEAAAKAGG-//SEQ ID NO:3355).

### EXAMPLES

### Preparation of GLP1-GIPR Fusion Expression Constructs

[0371] A Golden Gate Assembly (GGA) strategy was used to create all sequences with the general molecule design described in FIGS. 3, 8, 13, 18, 25 and 28. Briefly, GGA relies upon Typell restriction enzymes to cut and seamlessly ligate together multiple DNA fragments. In this example, the multiple DNA fragments consisted of a synthetic nucleic acid sequence (gBlock, Integrated DNA Technologies, Coralville, IA) encoding signal, GLP1 and linker peptides; another gBlock encoding anti-GIPR variable domains; an antibody constant domain fragment released from a Parts vector; and the expression vector backbone. Table 7 breaks out these representative fragments.

TABLE 7
Fragments Assembled to create GLP1-GIPR Fusion Constructs

| Fragment | Expression units encoded by the Fragment |
|---|---|
| gBlock1 | Signal Peptide-GLP1-Linker |
| gBlock2 | Variable domain of anti-GIPR antibody |
| Part | Constant domain corresponding to anti-GIPR variable domain |
| Vector | Desired Expression Vector |

[0372] This strategy allows mixing and matching of different GLP1-Linker combinations with different antibody chains. Repetitiveness in some linkers necessitated that portions of their sequence be split between the Signal-GLP1 gBlock and the anti-GIPR variable domain gBlock, but they otherwise followed the same strategy.

[0373] The GGA reactions were composed of 10 ng of gBlock1, 10 ng of gBlock2, 10 ng of the Part vector, 10 ng of the expression vector, 1 μl 10× Fast Digest Reaction Buffer+0.5 mM ATP (Thermo Fisher, Waltham, MA), 0.5 μl FastDigest Esp3I (Thermo Fisher, Waltham, MA), 1 μl T4 DNA Ligase (5 U/μl, Thermo Fisher, Waltham, MA) and water to 10 μl. The reactions were performed over 15 cycles consisting of a 2 minute digestion step at 37° C. and a 3 minute ligation step at 16° C. The 15 cycles were followed by a final 5 minute 37° C. digestion step and a 5 minute enzyme inactivation step at 80° C. The GGA product can then be directly transformed into competent cells for growth and screened by standard sequencing methods. Representative constructs as shown by amino acid composition are shown in Table 8.

TABLE 8
anti-GIPR antibodies and GLP-1/anti-GIPR antibody fusion polypeptides

| | Identi- | | | |
|---|---|---|---|---|
| Lot(s) | fier | Description | Sequence 1 | Sequence 2 |
| PL- | iPS: | [Unknown anti- | DIQMTQSPSSLSASIGDRVTITCRA | QVQLVESGGGVVQPGRSLRLSCAASGFTFSNFGMHWVRQAPGKGLEW |
| 42410 | 373184 | <huGIPR> SS- | SQDLRNYLGWYHQKPGKAPKRLI | VAVIWYDGSNENYADSVKGRFTISRDNSKNTLYLHMNSLRAADTAVY |
| | | 18644.006 VK1 (1- | YGASSLQSGVPSRFSGSGSGTCFT | YCARDGTIFGVVLGDYWGQGTLVTVSSASTKGPSVFPLAPSSKSTSGGT |
| | | 236)(E88(92)C) | LTISSLQPEDFATYYCLQHNNYPF | AALGCLVKDYFPEPVTVSWNSGALTSGVHTFPAVLQSSGLYSLSSVVT |
| | | VL]:: huKLC-CL + | TFGPGTKVDIKRTVAAPSVFIFPPS | VPSSSLGTQTYICNVNHKPSNTKVDKKVEPKSCDKTHTCPPCPAPELLG |
| | | [Unknown anti- | DEQLKSGTASVVCLLNNFYPREA | GPSVFLFPPKPKDTLMISRTPEVTCVVVDVSHEDPEVKFNWYVDGVEV |
| | | <huGIPR> 21-143_18F2 | KVQWKVDNALQSGNSQESVTEQ | HNAKTKPCEEQYGSTYRCVSVLTVLHQDWLNGKEYKCKVSNKALPAP |
| | | VH3 (1-473) | DSKDSTYSLSSTLTLSKADYEKH | IEKTISKAKGQPREPQVYTLPPSREEMTKNQVSLTCLVKGFYPSDIAVE |
| | | VH]:: huIgG1zSEFL2-2 | KVYACEVTHQGLSSPVTKSFNRG | WESNGQPENNYKTTPPVLDSDGSFFLYSKLTVDKSRWQQGNVFSCSV |
| | | (mAb) | EC (SEQ ID NO: 3366) | MHEALHNHYTQKSLSLSPGK (SEQ ID NO: 3657) |
| PL- | iPS: | [Unknown anti- | DIQMTQSPSSLSASIGDRVTITCRA | QVQLVESGGGVVQPGRSLRLSCAASGFTFSNFGMHWVRQAPGKGLEW |
| 42411 | 373196 | <huGIPR> 21-143_18F2 | SQDLRNYLGWYHQKPGKAPKRLI | VAVIWYDGSNENYADSVKGRFTISRDNSKNTLYLHMNSLRAADTAVY |
| | | VK1 (1-236) | YGASSLQSGVPSRFSGSGSGTEFT | YCARDGTIFGVVLGDYWGQGTLVTVSSASTKGPSVFPLAPSSKSTSGGT |
| | | VL]:: huKLC-CL + | LTISSLQPEDFATYYCLQHNNYPF | AALGCLVKDYFPEPVTVSWNSGALTSGVHTFPAVLQSSGLYSLSSVVT |
| | | [Unknown anti- | TFGPGTKVDIKRTVAAPSVFIFPPS | VPSSSLGTQTYICNVNHKPSNTKVDKKVEPKSCDKTHTCPPCPAPELLG |
| | | <huGIPR> SS- | DEQLKSGTASVVCLLNNFYPREA | GPSVFLFPPKPKDTLMISRTPEVTCVVVDVSHEDPCVKFNWYVDGVEV |
| | | 18644.008 VH3 (1- | KVQWKVDNALQSGNSQESVTEQ | HNAKTKPCEEQYGSTYRCVSVLTVLHQDWLNGKEYKCKVSNKALPAP |
| | | 473)(E384(298)C) | DSKDSTYSLSSTLTLSKADYEKH | IEKTISKAKGQPREPQVYTLPPSREEMTKNQVSLTCLVKGFYPSDIAVE |
| | | VH]:: huIgG1zSEFL2- | KVYACEVTHQGLSSPVTKSFNRG | WESNGQPENNYKTTPPVLDSDGSFFLYSKLTVDKSRWQQGNVFSCSV |
| | | 2_E384C (mAb) | EC (SEQ ID NO: 3367) | MHEALHNHYTQKSLSLSPGK (SEQ ID NO: 3658) |
| PL- | iPS: | [Unknown anti- | DIQMTQSPSSLSASIGDRVTITCRA | QVQLVESGGGVVQPGRSLRLSCAASGFTFSNFGMHWVRQAPGKGLEW |
| 42412 | 373202 | <huGIPR> 21-143_18F2 | SQDLRNYLGWYHQKPGKAPKRLI | VAVIWYDGSNENYADSVKGRFTISRDNSKNTLYLHMNSLRAADTAVY |
| | | VK1 (1-236) | YGASSLQSGVPSRFSGSGSGTEFT | YCARDGTIFGVVLGDYWGQGTLVTVSSASTKGPSVFPLAPSSKSTSGGT |
| | | VL]:: huKLC-CL + | LTISSLQPEDFATYYCLQHNNYPF | AALGCLVKDYFPEPVTVSWNSGALTSGVHTFPAVLQSSGLYSLSSVVT |
| | | [Unknown anti- | TFGPGTKVDIKRTVAAPSVFIFPPS | VPSSSLGTQTYICNVNHKPSNTKVDKKVEPKSCDKTHTCPPCPAPELLG |
| | | <huGIPR> SS- | DEQLKSGTASVVCLLNNFYPREA | GPSVFLFPPKPKDTLMISRTPEVTCVVVDVSHEDPEVKFNWYVDGVEV |
| | | 18644.009 VH3 (1- | KVQWKVDNALQSGNSQESVTEQ | HNAKTKPCEEQYGSTYRCVSVLTVLHQDWLNGKEYKCKVSNKALPAP |
| | | 473)(T487(385)C) | DSKDSTYSLSSTLTLSKADYEKH | IEKTISKAKGQPREPQVYTLPPSREEMCKNQVSLTCLVKGFYPSDIAVE |
| | | VH]:: huIgG1zSEFL2- | KVYACEVTHQGLSSPVTKSFNRG | WESNGQPENNYKTTPPVLDSDGSFFLYSKLTVDKSRWQQGNVFSCSV |
| | | 2_T487C (mAb) | EC (SEQ ID NO: 3368) | MHEALHNHYTQKSLSLSPGK (SEQ ID NO: 3659) |
| PL- | iPS: | [Unknown anti- | DIQLTQSPSSLSASVGDRVTITCR | QVQLVESGGGVVQPGRSLRLSCTASGFTFSSYGIHWVRQAPGKGLEWV |
| 42409 | 373932 | <huGIPR> SS- | ASQTISRFLNWYQQKPGKAPELLI | AVIWYDGSNKFHADSVKGRFTISRDNSKNTLYLQMNSLRAEDSAMYF |
| PL- | | 18654.001 VK1 (1- | YVASSLQSGVPSRFSGSGSGTCFT | CARGKVAGMPEAFEIWGQGTKVTVSSASTKGPSVFPLAPSSKSTSGGT |
| 43909 | | 236)(D88(92)C) | LTISSLQPEDFATYYCQQSYSTLIS | AALGCLVKDYFPEPVTVSWNSGALTSGVHTFPAVLQSSGLYSLSSVVT |
| | | VL]:: huKLC-CL + | FGQGTKLEITRTVAAPSVFIFPPSD | VPSSSLGTQTYICNVNHKPSNTKVDKKVEPKSCDKTHTCPPCPAPELLG |
| | | [Unknown anti- | EQLKSGTASVVCLLNNFYPREAK | GPSVFLFPPKPKDTLMISRTPEVTCVVVDVSHEDPEVKFNWYVDGVEV |
| | | <huGIPR> 21- | VQWKVDNALQSGNSQESVTEQD | HNAKTKPCEEQYGSTYRCVSVLTVLHQDWLNGKEYKCKVSNKALPAP |
| | | 143_5G12.005 VH3 (1- | SKDSTYSLSSTLTLSKADYEKHK | IEKTISKAKGQPREPQVYTLPPSREEMTKNQVSLTCLVKGFYPSDIAVE |
| | | 473) | VYACEVTHQGLSSPVTKSFNRGE | WESNGQPENNYKTTPPVLDSDGSFFLYSKLTVDKSRWQQGNVFSCSV |
| | | VH]:: huIgG1zSEFL2-2 | C (SEQ ID NO: 3369) | MHEALHNHYTQKSLSLSPGK (SEQ ID NO: 3660) |
| | | (mAb) | | |
| PL- | iPS: | [Unknown anti- | EIQLTQSPSSLSASVGDRVTITCRA | EVQLVESGGGVVQPGRSLRLSCTASGFTFSSYGIHWVRQAPGKGLEWV |
| 42476 | 373936 | <huGIPR> 5G12.006 (1- | SQTISRFLNWYQQKPGKAPELLIY | AVIWYDGSNKFHADSVKGRFTISRDNSKNTLYLQMNSLRAEDSAMYF |
| | | 236)(D1(23)E) | VASSLQSGVPSRFSGSGSGTDFTL | CARGKVAGMPEAFEIWGQGTKVTVSSASTKGPSVFPLAPSSKSTSGGT |
| | | VL]:: huKLC-CL + | TISSLQPEDFATYYCQQSYSTLISF | AALGCLVKDYFPEPVTVSWNSGALTSGVHTFPAVLQSSGLYSLSSVVT |
| | | [Unknown anti- | GQGTKLEITRTVAAPSVFIFPPSDE | VPSSSLGTQTYICNVNHKPSNTKVDKKVEPKSCDKTHTCPPCPAPELLG |
| | | <huGIPR> 5G12.005 (1- | QLKSGTASVVCLLNNFYPREAKV | GPSVFLFPPKPKDTLMISRTPEVTCVVVDVSHEDPEVKFNWYVDGVEV |
| | | 473)(Q1(23)E) | QWKVDNALQSGNSQESVTEQDS | HNAKTKPCEEQYGSTYRCVSVLTVLHQDWLNGKEYKCKVSNKALPAP |
| | | VH]:: huIgG1zSEFL2-2 | KDSTYSLSSTLTLSKADYEKHKV | IEKTISKAKGQPREPQVYTLPPSREEMTKNQVSLTCLVKGFYPSDIAVE |
| | | (mAb) | YACEVTHQGLSSPVTKSFNRGEC | WESNGQPENNYKTTPPVLDSDGSFFLYSKLTVDKSRWQQGNVFSCSV |
| | | | (SEQ ID NO: 3370) | MHEALHNHYTQKSLSLSPGK (SEQ ID NO: 3661) |
| PL- | iPS: | [Unknown anti- | DIQLTQSPSSLSASVGDRVTITCR | QVQLVESGGGVVQPGRSLRLSCTASGFTFSSYGIHWVRQAPGKGLEWV |
| 42475 | 373941 | <huGIPR> 21- | ASQTISRFLNWYQQKPGKAPELLI | AVIWYDGSNKFHADSVKGRFTISRDNSKNTLYLQMNSLRAEDSAMYF |
| PL- | | 143_5G12.006 VK1 (1- | YVASSLQSGVPSRFSGSGSGTDFT | CARGKVAGMPEAFEIWGQGTKVTVSSASTKGPSVFPLAPSSKSTSGGT |
| 43910 | | 236)(C137(118)I) | LTISSLQPEDFATYYCQQSYSTLIS | AALGCLVKDYFPEPVTVSWNSGALTSGVHTFPAVLQSSGLYSLSSVVT |
| PL- | | VL]:: huKLC-CL + | FGQGTKLEITRTVAAPSVFIFPPSD | VPSSSLGTQTYICNVNHKPSNTKVDKKVEPKSCDKTHTCPPCPAPELLG |
| 49579 | | [Unknown anti- | EQLKSGTASVVCLLNNFYPREAK | GPSVFLFPPKPKDTLMISRTPEVTCVVVDVSHEDPCVKFNWYVDGVEV |
| | | <huGIPR> 5G12.005 (1- | VQWKVDNALQSGNSQESVTEQD | HNAKTKPCEEQYGSTYRCVSVLTVLHQDWLNGKEYKCKVSNKALPAP |
| | | 473)(E384(298)C) | SKDSTYSLSSTLTLSKADYEKHK | IEKTISKAKGQPREPQVYTLPPSREEMTKNQVSLTCLVKGFYPSDIAVE |
| | | VH]:: huIgG1zSEFL2- | VYACEVTHQGLSSPVTKSFNRGE | WESNGQPENNYKTTPPVLDSDGSFFLYSKLTVDKSRWQQGNVFSCSV |
| | | 2_E384C (mAb) | C (SEQ ID NO: 3371) | MHEALHNHYTQKSLSLSPGK (SEQ ID NO: 3662) |
| PL- | iPS: | [Unknown anti- | DIQLTQSPSSLSASVGDRVTITCR | QVQLVESGGGVVQPGRSLRLSCTASGFTFSSYGIHWVRQAPGKGLEWV |
| 42474 | 373945 | <huGIPR> 21- | ASQTISRFLNWYQQKPGKAPELLI | AVIWYDGSNKFHADSVKGRFTISRDNSKNTLYLQMNSLRAEDSAMYF |
| PL- | | 143_5G12.006 VK1 (1- | YVASSLQSGVPSRFSGSGSGTDFT | CARGKVAGMPEAFEIWGQGTKVTVSSASTKGPSVFPLAPSSKSTSGGT |
| 43911 | | 236)(C137(118)I) | LTISSLQPEDFATYYCQQSYSTLIS | AALGCLVKDYFPEPVTVSWNSGALTSGVHTFPAVLQSSGLYSLSSVVT |
| | | VL]:: huKLC-CL + | FGQGTKLEITRTVAAPSVFIFPPSD | VPSSSLGTQTYICNVNHKPSNTKVDKKVEPKSCDKTHTCPPCPAPELLG |
| | | [Unknown anti- | EQLKSGTASVVCLLNNFYPREAK | GPSVFLFPPKPKDTLMISRTPEVTCVVVDVSHEDPEVKFNWYVDGVEV |
| | | <huGIPR> 5G12.005 (1- | VQWKVDNALQSGNSQESVTEQD | HNAKTKPCEEQYGSTYRCVSVLTVLHQDWLNGKEYKCKVSNKALPAP |
| | | 473)(T487(385)C) | SKDSTYSLSSTLTLSKADYEKHK | IEKTISKAKGQPREPQVYTLPPSREEMCKNQVSLTCLVKGFYPSDIAVE |
| | | VH]:: huIgG1zSEFL2- | VYACEVTHQGLSSPVTKSFNRGE | WESNGQPENNYKTTPPVLDSDGSFFLYSKLTVDKSRWQQGNVFSCSV |
| | | 2_T487C (mAb) | C (SEQ ID NO: 3372) | MHEALHNHYTQKSLSLSPGK (SEQ ID NO: 3663) |
| PL- | iPS: | [Unknown anti- | EIQMTQSPSSLSASIGDRVTITCRA | EVQLVESGGGVVQPGRSLRLSCAASGFTFSNFGMHWVRQAPGKGLEW |
| 42477 | 373949 | <huGIPR> 21-143_18F2 | SQDLRNYLGWYHQKPGKAPKRLI | VAVIWYDGSNENYADSVKGRFTISRDNSKNTLYLHMNSLRAADTAVY |
| | | (1-236)(D1(23)E) | YGASSLQSGVPSRFSGSGSGTEFT | YCARDGTIFGVVLGDYWGQGTLVTVSSASTKGPSVFPLAPSSKSTSGGT |
| | | VL]:: huKLC-CL + | LTISSLQPEDFATYYCLQHNNYPF | AALGCLVKDYFPEPVTVSWNSGALTSGVHTFPAVLQSSGLYSLSSVVT |
| | | [Unknown anti- | TFGPGTKVDIKRTVAAPSVFIFPPS | VPSSSLGTQTYICNVNHKPSNTKVDKKVEPKSCDKTHTCPPCPAPELLG |
| | | <huGIPR> 21-143_18F2 | DEQLKSGTASVVCLLNNFYPREA | GPSVFLFPPKPKDTLMISRTPEVTCVVVDVSHEDPEVKFNWYVDGVEV |
| | | (1-473)(Q1(23)E) | KVQWKVDNALQSGNSQESVTEQ | HNAKTKPCEEQYGSTYRCVSVLTVLHQDWLNGKEYKCKVSNKALPAP |
| | | VH]:: huIgG1zSEFL2-2 | DSKDSTYSLSSTLTLSKADYEKH | IEKTISKAKGQPREPQVYTLPPSREEMTKNQVSLTCLVKGFYPSDIAVE |
| | | (mAb) | KVYACEVTHQGLSSPVTKSFNRG | WESNGQPENNYKTTPPVLDSDGSFFLYSKLTVDKSRWQQGNVFSCSV |
| | | | EC (SEQ ID NO: 3373) | MHEALHNHYTQKSLSLSPGK (SEQ ID NO: 3664) |
| PL- | iPS: | huGLP- | HGEGTFTSDVSSYLEGQAAKEFIA | QVQLVESGGGVVQPGRSLRLSCAASGFTFSYFGMHWVRQAPGKGLEW |
| 42487 | 374770 | 1(R30G):: 1KmodT482V, | WLVKGGGGSGSATGGSGSVASS | VAVIWYDGSNKYYADSVKGRFTISRDNSKNTLYLQMNSLRAEDTAVY |
| | | M493L):: [hu anti- | GSGSATHLDIQMTQSPSSLSASIG | YCARDGTIFGVLLGDYWGQGTLVTVSSASTKGPSVFPLAPSSKSTSGGT |
| | | <huGIPR> 21-143_4B1 | DRVTITCRASQDIRDYLGWYQQK | AALGCLVKDYFPEPVTVSWNSGALTSGVHTFPAVLQSSGLYSLSSVVT |
| | | VL]:: huKLC + | PGKAPKRLIYGASSLQSGVPSRFS | VPSSSLGTQTYICNVNHKPSNTKVDKKVEPKSCDKTHTCPPCPAPELLG |
| | | [Unknown anti- | GSGSGTEFTLTISSLQPEDFATYY | GPSVFLFPPKPKDTLMISRTPEVTCVVVDVSHEDPEVKFNWYVDGVEV |
| | | <huGIPR> 21-143_6H1 | CLQHNNYPFTFGPGTKVDIKRTV | HNAKTKPCEEQYGSTYRCVSVLTVLHQDWLNGKEYKCKVSNKALPAP |
| | | VH3 (1-473) | AAPSVFIFPPSDEQLKSGTASVVC | IEKTISKAKGQPREPQVYTLPPSREEMTKNQVSLTCLVKGFYPSDIAVE |
| | | VH]:: huIgG1zSEFL2-2 | LLNNFYPREAKVQWKVDNALQS | WESNGQPENNYKTTPPVLDSDGSFFLYSKLTVDKSRWQQGNVFSCSV |
| | | (mAb-fusion) | GNSQESVTEQDSKDSTYSLSSTLT | MHEALHNHYTQKSLSLSPGK (SEQ ID NO: 3665) |
| | | | LSKADYEKHKVYACEVTHQGLSS | |
| | | | PVTKSFNRGEC (SEQ ID NO: 3374) | |
| PL- | iPS: | huGLP- | HGEGTFTSDVSSYLEGQAAKEFIAWLVKGGGGSGSATGGSGSVASSGSGS | DIQMTQSPSSLSASIGDRVTIT |
| 42834 | 374771 | 1(R30G):: 1KmodT482V, | ATHLQVQLVESGGGVVQPGRSLRLSCAASGFTFSYFGMHWVRQAPGKGL | CRASQDIRDYLGWYQQKPGK |
| PL- | | M493L):: [hu anti- | EWVAVIWYDGSNKYYADSVKGRFTISRDNSKNTLYLQMNSLRAEDTAVY | APKRLIYGASSLQSGVPSRFSG |
| 46306 | | <huGIPR> 21-143_6H1 | YCARDGTIFGVLLGDYWGQGTLVTVSSASTKGPSVFPLAPSSKSTSGGTAA | SGSGTEFTLTISSLQPEDFATY |
| | | VH]:: huIgG1zSEFL2-2 | LGCLVKDYFPEPVTVSWNSGALTSGVHTFPAVLQSSGLYSLSSVVTVPSSSL | YCLQHNNYPFTFGPGTKVDIK |
| | | + [Unknown anti- | GTQTYICNVNHKPSNTKVDKKVEPKSCDKTHTCPPCPAPELLGGPSVFLFPP | RTVAAPSVFIFPPSDEQLKSGT |
| | | <huGIPR> 21-143_4B1 | KPKDTLMISRTPEVTCVVVDVSHEDPEVKFNWYVDGVEVHNAKTKPCEEQ | ASVVCLLNNFYPREAKVQWK |
| | | VK1 (1-236) | YGSTYRCVSVLTVLHQDWLNGKEYKCKVSNKALPAPIEKTISKAKGQPRE | VDNALQSGNSQESVTEQDSK |
| | | VL]:: huKLC-CL (mAb- | PQVYTLPPSREEMTKNQVSLTCLVKGFYPSDIAVEWESNGQPENNYKTTPP | DSTYSLSSTLTLSKADYEKHK |
| | | fusion) | VLDSDGSFFLYSKLTVDKSRWQQGNVFSCSVMHEALHNHYTQKSLSLSPG | VYACEVTHQGLSSPVTKSFNR |
| | | | K (SEQ ID NO: 3375) | GEC (SEQ ID NO: 3666) |
| PL- | iPS: | huGLP- | HGEGTFTSDVSSYLEGQAAKEFIAWLV | QVQLVESGGGVVQPGRSLRLSCTASGFTFSSYGIHWVRQAPGKGL |
| 42835 | 374772 | 1(R30G):: 1KmodT482V, | KGGGGSGSATGGSGSVASSGSGSATH | EWVAVIWYDGSNKFHADSVKGRFTISRDNSKNTLYLQMNSLRAE |
| PL- | | M493L):: [hu anti- | LDIQLTQSPSSLSASVGDRVTITCRASQ | DSAMYFCARGKVAGMPEAFEIWGQGTKVTVSSASTKGPSVFPLA |
| 42860 | | <huGIPR> 21- | TISRFLNWYQQKPGKAPELLIYVASSL | PSSKSTSGGTAALGCLVKDYFPEPVTVSWNSGALTSGVHTFPAVL |
| | | 143_5G12.006 | QSGVPSRFSGSGSGTDFTLTISSLQPED | QSSGLYSLSSVVTVPSSSLGTQTYICNVNHKPSNTKVDKKVEPKSC |
| | | (C137(118)I) | FATYYCQQSYSTLISFGQGTKLEITRTV | DKTHTCPPCPAPELLGGPSVFLFPPKPKDTLMISRTPEVTCVVVDV |
| | | VL]:: huKLC + | AAPSVFIFPPSDEQLKSGTASVVCLLNN | SHEDPEVKFNWYVDGVEVHNAKTKPCEEQYGSTYRCVSVLTVL |
| | | [Unknown anti- | FYPREAKVQWKVDNALQSGNSQESVT | HQDWLNGKEYKCKVSNKALPAPIEKTISKAKGQPREPQVYTLPPS |
| | | <huGIPR> 21- | EQDSKDSTYSLSSTLTLSKADYEKHKV | REEMTKNQVSLTCLVKGFYPSDIAVEWESNGQPENNYKTTPPVL |
| | | 143_5G12.005 VH3 (1- | YACEVTHQGLSSPVTKSFNRGEC (SEQ | DSDGSFFLYSKLTVDKSRWQQGNVFSCSVMHEALHNHYTQKSLS |
| | | 473) | ID NO: 3376) | LSPGK (SEQ ID NO: 3667) |
| | | VH]:: huIgG1zSEFL2-2 | | |
| | | (mAb-fusion) | | |
| PL- | iPS: | huGLP- | HGEGTFTSDVSSYLEGQAAKEFIAWLVKGGGGSGSATGGSGSVASSGSGS | DIQLTQSPSSLSASVGDRVTIT |
| 42836 | 374773 | 1(R30G):: 1KmodT482V, | ATHLQVQLVESGGGVVQPGRSLRLSCTASGFTFSSYGIHWVRQAPGKGLE | CRASQTISRFLNWYQQKPGK |
| PL- | | M493L):: [hu anti- | WVAVIWYDGSNKFHADSVKGRFTISRDNSKNTLYLQMNSLRAEDSAMYF | APELLIYVASSLQSGVPSRFSG |
| 42861 | | <huGIPR> 21- | CARGKVAGMPEAFEIWGQGTKVTVSSASTKGPSVFPLAPSSKSTSGGTAAL | SGSGTDFTLTISSLQPEDFATY |
| PL- | | 143_5G12.005 | GCLVKDYFPEPVTVSWNSGALTSGVHTFPAVLQSSGLYSLSSVVTVPSSSL | YCQQSYSTLISFGQGTKLEITR |
| 43385 | | VH]:: huIgG1zSEFL2-2 | GTQTYICNVNHKPSNTKVDKKVEPKSCDKTHTCPPCPAPELLGGPSVFLFPP | TVAAPSVFIFPPSDEQLKSGTA |
| PL- | | + [Unknown anti- | KPKDTLMISRTPEVTCVVVDVSHEDPEVKFNWYVDGVEVHNAKTKPCEEQ | SVVCLLNNFYPREAKVQWKV |
| 43386 | | <huGIPR> 21- | YGSTYRCVSVLTVLHQDWLNGKEYKCKVSNKALPAPIEKTISKAKGQPRE | DNALQSGNSQESVTEQDSKD |
| | | 143_5G12.006 VK1 (1- | PQVYTLPPSREEMTKNQVSLTCLVKGFYPSDIAVEWESNGQPENNYKTTPP | STYSLSSTLTLSKADYEKHKV |
| | | 236)(C137(118)I) | VLDSDGSFFLYSKLTVDKSRWQQGNVFSCSVMHEALHNHYTQKSLSLSPG | YACEVTHQGLSSPVTKSFNRG |
| | | VL]:: huKLC-CL (mAb- | K (SEQ ID NO: 3377) | EC (SEQ ID NO: 3668) |
| | | fusion) | | |
| PL- | iPS: | huGLP- | HGEGTFTSDVSSYLEGQAAKEFIAWL | QVQLVESGGGVVQPGRSLRLSCAASGFTFSNFGMHWVRQAPGKG |
| 42837 | 374774 | 1(R30G):: 1KmodT482V, | VKGGGGSGSATGGSGSVASSGSGSAT | LEWVAVIWYDGSNENYADSVKGRFTISRDNSKNTLYLHMNSLRA |
| | | M493L):: [hu anti- | HLDIQMTQSPSSLSASIGDRVTITCRA | ADTAVYYCARDGTIFGVVLGDYWGQGTLVTVSSASTKGPSVFPLA |
| | | <huGIPR> 21-143_18F2 | SQDLRNYLGWYHQKPGKAPKRLIYG | PSSKSTSGGTAALGCLVKDYFPEPVTVSWNSGALTSGVHTFPAVLQ |
| | | VL]:: huKLC + | ASSLQSGVPSRFSGSGSGTEFTLTISSL | SSGLYSLSSVVTVPSSSLGTQTYICNVNHKPSNTKVDKKVEPKSCD |
| | | [Unknown anti- | QPEDFATYYCLQHNNYPFTFGPGTKV | KTHTCPPCPAPELLGGPSVFLFPPKPKDTLMISRTPEVTCVVVDVSH |
| | | <huGIPR> 21-143_18F2 | DIKRTVAAPSVFIFPPSDEQLKSGTAS | EDPEVKFNWYVDGVEVHNAKTKPCEEQYGSTYRCVSVLTVLHQD |
| | | VH3 (1-473) | VVCLLNNFYPREAKVQWKVDNALQS | WLNGKEYKCKVSNKALPAPIEKTISKAKGQPREPQVYTLPPSREEM |
| | | VH]:: huIgG1zSEFL2-2 | GNSQESVTEQDSKDSTYSLSSTLTLSK | TKNQVSLTCLVKGFYPSDIAVEWESNGQPENNYKTTPPVLDSDGSF |
| | | (mAb-fusion) | ADYEKHKVYACEVTHQGLSSPVTKS | FLYSKLTVDKSRWQQGNVFSCSVMHEALHNHYTQKSLSLSPGK |
| | | | FNRGEC (SEQ ID NO: 3378) | (SEQ ID NO: 3669) |
| PL- | iPS: | huGLP- | HGEGTFTSDVSSYLEGQAAKEFIAWLVKGGGGSGSATGGSGSVASSGSGS | DIQMTQSPSSLSASIGDRVTITC |
| 43383 | 374775 | 1(R30G):: 1KmodT482V, | ATHLQVQLVESGGGVVQPGRSLRLSCAASGFTFSNFGMHWVRQAPGKGL | RASQDLRNYLGWYHQKPGKA |
| PL- | | M493L):: [hu anti- | EWVAVIWYDGSNENYADSVKGRFTISRDNSKNTLYLHMNSLRAADTAV | PKRLIYGASSLQSGVPSRFSGSG |
| 43384 | | <huGIPR> 21-143_18F2 | YYCARDGTIFGVVLGDYWGQGTLVTVSSASTKGPSVFPLAPSSKSTSGGT | SGTEFTLTISSLQPEDFATYYCL |
| | | VH]:: huIgG1zSEFL2-2 | AALGCLVKDYFPEPVTVSWNSGALTSGVHTFPAVLQSSGLYSLSSVVTVP | QHNNYPFTFGPGTKVDIKRTV |
| | | + [Unknown anti- | SSSLGTQTYICNVNHKPSNTKVDKKVEPKSCDKTHTCPPCPAPELLGGPSV | AAPSVFIFPPSDEQLKSGTASVV |
| | | <huGIPR> 21-143_18F2 | FLFPPKPKDTLMISRTPEVTCVVVDVSHEDPEVKFNWYVDGVEVHNAKT | CLLNNFYPREAKVQWKVDNA |
| | | VK1 (1-236) | KPCEEQYGSTYRCVSVLTVLHQDWLNGKEYKCKVSNKALPAPIEKTISKA | LQSGNSQESVTEQDSKDSTYSL |
| | | VL]:: huKLC-CL (mAb- | KGQPREPQVYTLPPSREEMTKNQVSLTCLVKGFYPSDIAVEWESNGQPEN | SSTLTLSKADYEKHKVYACEV |
| | | fusion) | NYKTTPPVLDSDGSFFLYSKLTVDKSRWQQGNVFSCSVMHEALHNHYTQ | THQGLSSPVTKSFNRGEC (SEQ |
| | | | KSLSLSPGK (SEQ ID NO: 3379) | ID NO: 3670) |
| PL- | iPS: | [hu anti-<*DNP> 3A4 | QVQLVESGGGVVQPGRSLRLSCAASGFTFSSYGMHWVRQAPGKGLEWV | DIQMTQSPSSVSASVGDRVTIT |
| 42471 | 375070 | (W101F) | AVIWYDGSNKYYADSVKGRFTISRDNSKNTLYLQMNSLRAEDTAVYYCA | CRASQGISRRLAWYQQKPGKA |
| PL- | | VH]:: huIgG1zSEFL2- | RYNFNYGMDVWGQGTTVTVSSASTKGPSVFPLAPSSKSTSGGTAALGCL | PKLLIYAASSLQSGVPSRFSGSG |
| 47504 | | 2_E384C + [hu anti- | VKDYFPEPVTVSWNSGALTSGVHTFPAVLQSSGLYSLSSVVTVPSSSLGTQ | SGTDFTLTISSLQPEDFATYYCQ |
| PL- | | <*DNP> 3A4 | TYICNVNHKPSNTKVDKKVEPKSCDKTHTCPPCPAPELLGGPSVFLFPPKP | QANSFPFTFGPGTKVDIKRTVA |
| 42815 | | VL]:: huKLC (mAb) | KDTLMISRTPEVTCVVVDVSHEDPCVKFNWYVDGVEVHNAKTKPCEEQ | APSVFIFPPSDEQLKSGTASVVC |
| PL- | | | YGSTYRCVSVLTVLHQDWLNGKEYKCKVSNKALPAPIEKTISKAKGQPR | LLNNFYPREAKVQWKVDNAL |
| 42816 | | | EPQVYTLPPSREEMTKNQVSLTCLVKGFYPSDIAVEWESNGQPENNYKTT | QSGNSQESVTEQDSKDSTYSLS |
| PL- | | | PPVLDSDGSFFLYSKLTVDKSRWQQGNVFSCSVMHEALHNHYTQKSLSL | STLTLSKADYEKHKVYACEVT |
| 42817 | | | SPGK (SEQ ID NO: 3380) | HQGLSSPVTKSFNRGEC (SEQ |
| | | | | ID NO: 3671) |
| PL- | iPS: | gila monsterExendin- | HGEGTFTSDLSKQMEEEAVRLAAQA | QVQLVESGGGVVQPGRSLRLSCAASGFTLSSYGMHWVRQAPGKGL |
| 42838 | 376451 | 4(1-21):: | AQQGGGGSGSATGGSGSVASSGSGS | EWVAVIWYDGSNKYYADSVKGRFTISRDNSKNTLYLQMNSLRAED |
| PL- | | 1AQ1K(modV,GS):: | ATGSAIQMTQSPSSVSASIGDRVTITC | TAVYYCARGGGSGSYRYYYYGLDVWGQGTTVTVSSASTKGPSVFP |
| 42839 | | [hu anti-<huGLP-1R> | RASQNINNLLAWYQQKPGKAPKLLI | LAPCSRSTSESTAALGCLVKDYFPEPVTVSWNSGALTSGVHTFPAVL |
| | | 3E6 VL]:: huKLC + [hu | YTASSLQSEVPSRFSGSGSGTDFTLTI | QSSGLYSLSSVVTVPSSNFGTQTYTCNVDHKPSNTKVDKTVERKCC |
| | | anti-<huGLP-1R> 3E6.1 | SSLQPEDFAIYCCQQAHRFPPTFGQG | VECPPCPAPPVAGPSVFLFPPKPKDTLMISRTPEVTCVVVDVSHEDPE |
| | | VH]:: huIgG2TQ (mAb) | TKVEIRRTVAAPSVFIFPPSDEQLKSG | VQFNWYVDGVEVHNAKTKPREEQFNSTFRVVSVLTVVHQDWLNG |
| | | | TASVVCLLNNFYPREAKVQWKVDN | KEYKCKVSNKGLPAPIEKTISKTKGQPREPQVYTLPPSREEMTKNQV |
| | | | ALQSGNSQESVTEQDSKDSTYSLSST | SLTCLVKGFYPSDIAVEWESNGQPENNYKTTPPMLDSDGSFFLYSKL |
| | | | LTLSKADYEKHKVYACEVTHQGLSS | TVDKSRWQQGNVFSCSVMHEALHNHYTQKSLSLSPGK (SEQ ID |
| | | | PVTKSFNRGEC (SEQ ID NO: 3381) | NO: 3672) |
| PL- | iPS: | gila monsterExendin- | HGEGTFTSDLSKQMEEEAVRLFAAQ | QVQLVESGGGVVQPGRSLRLSCAASGFTLSSYGMHWVRQAPGKGL |
| 42840 | 376452 | 4(1-22):: | AAQQGGGGSGSATGGSGSVASSGSG | EWVAVIWYDGSNKYYADSVKGRFTISRDNSKNTLYLQMNSLRAED |
| PL- | | 1AQ1K(modV,GS):: | SATGSAIQMTQSPSSVSASIGDRVTIT | TAVYYCARGGGSGSYRYYYYGLDVWGQGTTVTVSSASTKGPSVFP |
| 42841 | | [hu anti-<huGLP-1R> | CRASQNINNLLAWYQQKPGKAPKLL | LAPCSRSTSESTAALGCLVKDYFPEPVTVSWNSGALTSGVHTFPAVL |
| | | 3E6 VL]:: huKLC + [hu | IYTASSLQSEVPSRFSGSGSGTDFTLT | QSSGLYSLSSVVTVPSSNFGTQTYTCNVDHKPSNTKVDKTVERKCC |
| | | anti-<huGLP-1R> 3E6.1 | ISSLQPEDFAIYCCQQAHRFPPTFGQ | VECPPCPAPPVAGPSVFLFPPKPKDTLMISRTPEVTCVVVDVSHEDPE |
| | | VH]:: huIgG2TQ (mAb) | GTKVEIRRTVAAPSVFIFPPSDEQLKS | VQFNWYVDGVEVHNAKTKPREEQFNSTFRVVSVLTVVHQDWLNG |
| | | | GTASVVCLLNNFYPREAKVQWKVD | KEYKCKVSNKGLPAPIEKTISKTKGQPREPQVYTLPPSREEMTKNQV |
| | | | NALQSGNSQESVTEQDSKDSTYSLSS | SLTCLVKGFYPSDIAVEWESNGQPENNYKTTPPMLDSDGSFFLYSKL |
| | | | TLTLSKADYEKHKVYACEVTHQGLS | TVDKSRWQQGNVFSCSVMHEALHNHYTQKSLSLSPGK (SEQ ID |
| | | | SPVTKSFNRGEC (SEQ ID NO: 3382) | NO: 3673) |
| PL- | iPS: | gila monsterExendin- | HGEGTFTSDLSKQMEEEAVRLFGSG | QVQLVESGGGVVQPGRSLRLSCAASGFTLSSYGMHWVRQAPGKGL |
| 42842 | 376453 | 4(1-22):: | SATGGSGSVASSGSGSATGSAIQMT | EWVAVIWYDGSNKYYADSVKGRFTISRDNSKNTLYLQMNSLRAED |
| PL- | | 1K(modV,GS):: [hu | QSPSSVSASIGDRVTITCRASQNINNL | TAVYYCARGGGSGSYRYYYYGLDVWGQGTTVTVSSASTKGPSVFP |
| 42843 | | anti-<huGLP-1R> 3E6 | LAWYQQKPGKAPKLLIYTASSLQSE | LAPCSRSTSESTAALGCLVKDYFPEPVTVSWNSGALTSGVHTFPAVL |
| | | VL]:: huKLC + [hu | VPSRFSGSGSGTDFTLTISSLQPEDFA | QSSGLYSLSSVVTVPSSNFGTQTYTCNVDHKPSNTKVDKTVERKCC |
| | | anti- | IYCCQQAHRFPPTFGQGTKVEIRRTV | VECPPCPAPPVAGPSVFLFPPKPKDTLMISRTPEVTCVVVDVSHEDPE |
| | | <huGLP-1R> 3E6.1 | AAPSVFIFPPSDEQLKSGTASVVCLL | VQFNWYVDGVEVHNAKTKPREEQFNSTFRVVSVLTVVHQDWLNG |
| | | VH]:: huIgG2TQ (mAb) | NNFYPREAKVQWKVDNALQSGNSQ | KEYKCKVSNKGLPAPIEKTISKTKGQPREPQVYTLPPSREEMTKNQV |
| | | | ESVTEQDSKDSTYSLSSTLTLSKADY | SLTCLVKGFYPSDIAVEWESNGQPENNYKTTPPMLDSDGSFFLYSKL |
| | | | EKHKVYACEVTHQGLSSPVTKSFNR | TVDKSRWQQGNVFSCSVMHEALHNHYTQKSLSLSPGK (SEQ ID |
| | | | GEC (SEQ ID NO: 3383) | NO: 3674) |
| PL- | iPS: | gila monsterExendin- | HGEGTFTSDLSKQMEEEAVRLFIGSG | QVQLVESGGGVVQPGRSLRLSCAASGFTLSSYGMHWVRQAPGKGL |
| 42844 | 376454 | 4(1-23):: | SATGGSGSVASSGSGSATGSAIQMT | EWVAVIWYDGSNKYYADSVKGRFTISRDNSKNTLYLQMNSLRAED |
| PL- | | 1K(modV,GS):: [hu | QSPSSVSASIGDRVTITCRASQNINNL | TAVYYCARGGGSGSYRYYYYGLDVWGQGTTVTVSSASTKGPSVFP |
| 43387 | | anti-<huGLP-1R> 3E6 | LAWYQQKPGKAPKLLIYTASSLQSE | LAPCSRSTSESTAALGCLVKDYFPEPVTVSWNSGALTSGVHTFPAVL |
| PL- | | VL]:: huKLC + [hu | VPSRFSGSGSGTDFTLTISSLQPEDFA | QSSGLYSLSSVVTVPSSNFGTQTYTCNVDHKPSNTKVDKTVERKCC |
| 43388 | | anti- | IYCCQQAHRFPPTFGQGTKVEIRRTV | VECPPCPAPPVAGPSVFLFPPKPKDTLMISRTPEVTCVVVDVSHEDPE |
| PL- | | <huGLP-1R> 3E6.1 | AAPSVFIFPPSDEQLKSGTASVVCLL | VQFNWYVDGVEVHNAKTKPREEQFNSTFRVVSVLTVVHQDWLNG |
| 43389 | | VH]:: huIgG2TQ (mAb) | NNFYPREAKVQWKVDNALQSGNSQ | KEYKCKVSNKGLPAPIEKTISKTKGQPREPQVYTLPPSREEMTKNQV |
| PL- | | | ESVTEQDSKDSTYSLSSTLTLSKADY | SLTCLVKGFYPSDIAVEWESNGQPENNYKTTPPMLDSDGSFFLYSKL |
| 42862 | | | EKHKVYACEVTHQGLSSPVTKSFNR | TVDKSRWQQGNVFSCSVMHEALHNHYTQKSLSLSPGK (SEQ ID |
| | | | GEC (SEQ ID NO: 3384) | NO: 3675) |
| PL- | iPS: | [Chimera mu anti- | QVTLKESGPGILQPSQTLSLTCSFSGFSLSTFGMGVGWIRQPPGKGLEWL | DIVMTQSPSSLAMSVGQKVTMS |
| 42465 | 382976 | <huGLP-1R> 20M4.3 | AHIWWDDDKYYNPALKSRLTISKDTSKNQVFLKIANVDTADTATYYCA | CKSSQSLLNSSNQKNYLAWYQQ |
| | | VH]:: huIgG2TQ + | RKGNFAWFTYWGQGTLVTVSAASTKGPSVFPLAPCSRSTSESTAALGC | KPGQSPKLLIYFASTRESGVPDRF |
| | | [Chimera mu anti- | LVKDYFPEPVTVSWNSGALTSGVHTFPAVLQSSGLYSLSSVVTVPSSNF | IGSGSGTDFTLTISSVQAEDLADY |
| | | <huGLP-1R> 20M4.3 | GTQTYTCNVDHKPSNTKVDKTVERKCCVECPPCPAPPVAGPSVFLFPPK | FCQQHYYTPYTFGGGTKLEIKRT |
| | | VL]:: huKLC (mAb) | PKDTLMISRTPEVTCVVVDVSHEDPEVQFNWYVDGVEVHNAKTKPREE | VAAPSVFIFPPSDEQLKSGTASVV |
| | | | QFNSTFRVVSVLTVVHQDWLNGKEYKCKVSNKGLPAPIEKTISKTKGQ | CLLNNFYPREAKVQWKVDNALQ |
| | | | PREPQVYTLPPSREEMTKNQVSLTCLVKGFYPSDIAVEWESNGQPENNY | SGNSQESVTEQDSKDSTYSLSSTL |
| | | | KTTPPMLDSDGSFFLYSKLTVDKSRWQQGNVFSCSVMHEALHNHYTQ | TLSKADYEKHKVYACEVTHQGL |
| | | | KSLSLSPGK (SEQ ID NO: 3385) | SSPVTKSFNRGEC (SEQ ID NO: |
| | | | | 3676) |
| PL- | iPS: | [Unknown anti- | DIQMTQSPSSLSASIGDRVTITCRA | QVQLVESGGGVVQPGRSLRLSCAASGFTFSYFGMHWVRQAPGKGLEW |
| 45575 | 398842 | <huGIPR> 21- | SQDIRDYLGWYQQKPGKAPKRLI | VAVIWYDGSNKYYADSVKGRFTISRDNSKNTLYLQMNSLRAEDTAVY |
| | | 143_4B1VL.001 (1- | YGASSLQSGVPSRFSGSGSGTCFT | YCARDGTIFGVLLGDYWGQGTLVTVSSASTKGPSVFPLAPSSKSTSGGT |
| | | 236)(E88(92)C) | LTISSLQPEDFATYYCLQHNNYPF | AALGCLVKDYFPEPVTVSWNSGALTSGVHTFPAVLQSSGLYSLSSVVT |
| | | VL]:: huKLC-CL + | TFGPGTKVDIKRTVAAPSVFIFPPS | VPSSSLGTQTYICNVNHKPSNTKVDKKVEPKSCDKTHTCPPCPAPELLG |
| | | [Unknown anti- | DEQLKSGTASVVCLLNNFYPREA | GPSVFLFPPKPKDTLMISRTPEVTCVVVDVSHEDPEVKFNWYVDGVEV |
| | | <huGIPR> 21-143_6H1 | KVQWKVDNALQSGNSQESVTEQ | HNAKTKPCEEQYGSTYRCVSVLTVLHQDWLNGKEYKCKVSNKALPAP |
| | | VH3 (1-473) | DSKDSTYSLSSTLTLSKADYEKH | IEKTISKAKGQPREPQVYTLPPSREEMTKNQVSLTCLVKGFYPSDIAVE |
| | | VH]:: huIgG1zSEFL2-2 | KVYACEVTHQGLSSPVTKSFNRG | WESNGQPENNYKTTPPVLDSDGSFFLYSKLTVDKSRWQQGNVFSCSV |
| | | (mAb) | EC (SEQ ID NO: 3386) | MHEALHNHYTQKSLSLSPGK (SEQ ID NO: 3677) |
| PL- | iPS: | [Unknown anti- | DIQMTQSPSSLSASIGDRVTITCRA | QVQLVESGGGVVQPGRSLRLSCAASGFTFSYFGMHWVRQAPGKGLEW |
| 45573 | 398860 | <huGIPR> 21-143_4B1 | SQDIRDYLGWYQQKPGKAPKRLI | VAVIWYDGSNKYYADSVKGRFTISRDNSKNTLYLQMNSLRAEDTAVY |
| | | VK1 (1-236) | YGASSLQSGVPSRFSGSGSGTEFT | YCARDGTIFGVLLGDYWGQGTLVTVSSASTKGPSVFPLAPSSKSTSGGT |
| | | VL]:: huKLC-CL + | LTISSLQPEDFATYYCLQHNNYPF | AALGCLVKDYFPEPVTVSWNSGALTSGVHTFPAVLQSSGLYSLSSVVT |
| | | [Unknown anti- | TFGPGTKVDIKRTVAAPSVFIFPPS | VPSSSLGTQTYICNVNHKPSNTKVDKKVEPKSCDKTHTCPPCPAPELLG |
| | | <huGIPR> 21- | DEQLKSGTASVVCLLNNFYPREA | GPSVFLFPPKPKDTLMISRTPEVTCVVVDVSHEDPEVKFNWYVDGVEV |
| | | 143_6H1.004 | KVQWKVDNALQSGNSQESVTEQ | HNAKTKPCEEQYGSTYRCVSVLTVLHQDWLNGKEYKCKVSNKALPAP |
| | | (T487(385)C) | DSKDSTYSLSSTLTLSKADYEKH | IEKTISKAKGQPREPQVYTLPPSREEMCKNQVSLTCLVKGFYPSDIAVE |
| | | VH]:: huIgG1zSEFL2- | KVYACEVTHQGLSSPVTKSFNRG | WESNGQPENNYKTTPPVLDSDGSFFLYSKLTVDKSRWQQGNVFSCSV |
| | | 2_T487C (mAb) | EC (SEQ ID NO: 3387) | MHEALHNHYTQKSLSLSPGK (SEQ ID NO: 3678) |
| PL- | iPS: | [Unknown anti- | DIQMTQSPSSLSASIGDRVTITCRA | QVQLVESGGGVVQPGRSLRLSCAASGFTFSYFGMHWVRQAPGKGLEW |
| 45574 | 398863 | <huGIPR> 21-143_4B1 | SQDIRDYLGWYQQKPGKAPKRLI | VAVIWYDGSNKYYADSVKGRFTISRDNSKNTLYLQMNSLRAEDTAVY |
| | | VK1 (1-236) | YGASSLQSGVPSRFSGSGSGTEFT | YCARDGTIFGVLLGDYWGQGTLVTVSSASTKGPSVFPLAPSSKSTSGGT |
| | | VL]:: huKLC-CL + | LTISSLQPEDFATYYCLQHNNYPF | AALGCLVKDYFPEPVTVSWNSGALTSGVHTFPAVLQSSGLYSLSSVVT |
| | | [Unknown anti- | TFGPGTKVDIKRTVAAPSVFIFPPS | VPSSSLGTQTYICNVNHKPSNTKVDKKVEPKSCDKTHTCPPCPAPELLG |
| | | <huGIPR> 21- | DEQLKSGTASVVCLLNNFYPREA | GPSVFLFPPKPKDTLMISRTPEVTCVVVDVSHEDPCVKFNWYVDGVEV |
| | | 143_6H1.005 (1-473) | KVQWKVDNALQSGNSQESVTEQ | HNAKTKPCEEQYGSTYRCVSVLTVLHQDWLNGKEYKCKVSNKALPAP |
| | | VH]:: huIgG1zSEFL2- | DSKDSTYSLSSTLTLSKADYEKH | IEKTISKAKGQPREPQVYTLPPSREEMTKNQVSLTCLVKGFYPSDIAVE |
| | | 2_E384C (mAb) | KVYACEVTHQGLSSPVTKSFNRG | WESNGQPENNYKTTPPVLDSDGSFFLYSKLTVDKSRWQQGNVFSCSV |
| | | | EC (SEQ ID NO: 3388) | MHEALHNHYTQKSLSLSPGK (SEQ ID NO: 3679) |
| PL- | iPS: | huGLP- | HGEGTFTSDVSSYLEGQAAKEFIAWLVKGGGGSGSATGGSGSVASSGSGS | DIQMTQSPSSLSASEGDRVTIT |
| 45588 | 411889 | 1(R30G):: 1KmodT482V, | ATHLQVQLQESGPGLVKPSETLSLTCTVSGGSISSYYWSWIRQPPGKGLEWI | CRASQGIRNDLGWYQQKPGK |
| PL- | | M493L):: [hu anti- | GYIYYSGNTNSNPSLKSRVTISVDTSKNQFSLKLSSVTAADTAVYYCARTY | APKRLIYAASSLQSGVPLRFS |
| 45589 | | <*DNP> 3B1 | YDSSGYYYRAFDIWGQGTMVTVSSASTKGPSVFPLAPSSKSTSGGTAALGC | GSGSGTEFTLTISSLQPEDFAT |
| | | VH]:: huIgG1zSEFL2-2 | LVKDYFPEPVTVSWNSGALTSGVHTFPAVLQSSGLYSLSSVVTVPSSSLGT | YYCLQYNSYPWTFGQGTKVE |
| | | + [hu anti-<*DNP> 3B1 | QTYICNVNHKPSNTKVDKKVEPKSCDKTHTCPPCPAPELLGGPSVFLFPPKP | IKRTVAAPSVFIFPPSDEQLKS |
| | | VL]:: huKLC (Fc | KDTLMISRTPEVTCVVVDVSHEDPEVKFNWYVDGVEVHNAKTKPCEEQY | GTASVVCLLNNFYPREAKVQ |
| | | Fusion) | GSTYRCVSVLTVLHQDWLNGKEYKCKVSNKALPAPIEKTISKAKGQPREP | WKVDNALQSGNSQESVTEQD |
| | | | QVYTLPPSREEMTKNQVSLTCLVKGFYPSDIAVEWESNGQPENNYKTTPPV | SKDSTYSLSSTLTLSKADYEK |
| | | | LDSDGSFFLYSKLTVDKSRWQQGNVFSCSVMHEALHNHYTQKSLSLSPGK | HKVYACEVTHQGLSSPVTKSF |
| | | | (SEQ ID NO: 3389) | NRGEC (SEQ ID NO: 3680) |
| PL- | iPS: | huGLP-1(R30G, | HGEGTFTSDVSSYLEEQAAKEFIAWLVKGGGGSGSATGGSGSVASSGSGSA | DIQMTQSPSSLSASEGDRVTIT |
| 45590 | 411892 | G16E):: 1KmodT482V, | THLQVQLQESGPGLVKPSETLSLTCTVSGGSISSYYWSWIRQPPGKGLEWIG | CRASQGIRNDLGWYQQKPGK |
| | | M493L):: [hu anti- | YIYYSGNTNSNPSLKSRVTISVDTSKNQFSLKLSSVTAADTAVYYCARTYY | APKRLIYAASSLQSGVPLRFS |
| | | <*DNP> 3B1 | DSSGYYYRAFDIWGQGTMVTVSSASTKGPSVFPLAPSSKSTSGGTAALGCL | GSGSGTEFTLTISSLQPEDFAT |
| | | VH]:: huIgG1zSEFL2-2 | VKDYFPEPVTVSWNSGALTSGVHTFPAVLQSSGLYSLSSVVTVPSSSLGTQ | YYCLQYNSYPWTFGQGTKVE |
| | | + [hu anti-<*DNP> | TYICNVNHKPSNTKVDKKVEPKSCDKTHTCPPCPAPELLGGPSVFLFPPKPK | IKRTVAAPSVFIFPPSDEQLKS |
| | | 3B1 VL]:: huKLC (Fc | DTLMISRTPEVTCVVVDVSHEDPEVKFNWYVDGVEVHNAKTKPCEEQYGS | GTASVVCLLNNFYPREAKVQ |
| | | Fusion) | TYRCVSVLTVLHQDWLNGKEYKCKVSNKALPAPIEKTISKAKGQPREPQV | WKVDNALQSGNSQESVTEQD |
| | | | YTLPPSREEMTKNQVSLTCLVKGFYPSDIAVEWESNGQPENNYKTTPPVLD | SKDSTYSLSSTLTLSKADYEK |
| | | | SDGSFFLYSKLTVDKSRWQQGNVFSCSVMHEALHNHYTQKSLSLSPGK | HKVYACEVTHQGLSSPVTKSF |
| | | | (SEQ ID NO: 3390) | NRGEC (SEQ ID NO: 3681) |
| PL- | iPS: | huGLP- | HGEGTFTSDVSSYLEGQAAKEFIAWLVKGGGGSGSATGGSGSVASSGSGS | EIVLTQSPGTLSLSPGERATLS |
| 45584 | 411895 | 1(R30G):: 1KmodT482V, | ATHLQVQLQESGPGLVKPSQTLSLTCTVSGGSISSGDYFWSWIRQLPGKGL | CRASQGISRSELAWYQQKPG |
| PL- | | M493L):: [hu anti- | EWIGHIHNSGTTYYNPSLKSRVTISVDTSKKQFSLRLSSVTAADTAVYYCA | QAPSLLIYGASSRATGIPDRFS |
| 45585 | | <huTRAILR2> XG1- | RDRGGDYAYGMDVWGQGTTVTVSSASTKGPSVFPLAPSSKSTSGGTAALG | GSGSGTDFTLTISRLEPEDFAV |
| | | 048(Y133(125)A) | CLVKDYFPEPVTVSWNSGALTSGVHTFPAVLQSSGLYSLSSVVTVPSSSLGT | YYCQQFGSSPWTFGQGTKVEI |
| | | VH]:: huIgG1zSEFL2-2 | QTYICNVNHKPSNTKVDKKVEPKSCDKTHTCPPCPAPELLGGPSVFLFPPKP | KRTVAAPSVFIFPPSDEQLKSG |
| | | + [hu anti-<huTR2> | KDTLMISRTPEVTCVVVDVSHEDPEVKFNWYVDGVEVHNAKTKPCEEQY | TASVVCLLNNFYPREAKVQW |
| | | XG1-048(1-108)(Y53E) | GSTYRCVSVLTVLHQDWLNGKEYKCKVSNKALPAPIEKTISKAKGQPREP | KVDNALQSGNSQESVTEQDS |
| | | VL]:: huKLC (Fc | QVYTLPPSREEMTKNQVSLTCLVKGFYPSDIAVEWESNGQPENNYKTTPPV | KDSTYSLSSTLTLSKADYEKH |
| | | Fusion) | LDSDGSFFLYSKLTVDKSRWQQGNVFSCSVMHEALHNHYTQKSLSLSPGK | KVYACEVTHQGLSSPVTKSFN |
| | | | (SEQ ID NO: 3391) | RGEC (SEQ ID NO: 3682) |
| PL- | iPS: | huGLP-1(R30G, | HGEGTFTSDVSSYLEEQAAKEFIAWLVKGGGGSGSATGGSGSVASSGSGSA | EIVLTQSPGTLSLSPGERATLS |
| 45586 | 411898 | G16E):: 1KmodT482V, | THLQVQLQESGPGLVKPSQTLSLTCTVSGGSISSGDYFWSWIRQLPGKGLE | CRASQGISRSELAWYQQKPG |
| PL- | | M493L):: [hu | WIGHIHNSGTTYYNPSLKSRVTISVDTSKKQFSLRLSSVTAADTAVYYCAR | QAPSLLIYGASSRATGIPDRFS |
| 45587 | | anti-<huTRAILR2> | DRGGDYAYGMDVWGQGTTVTVSSASTKGPSVFPLAPSSKSTSGGTAALGC | GSGSGTDFTLTISRLEPEDFAV |
| | | XG1-048(Y133(125)A) | LVKDYFPEPVTVSWNSGALTSGVHTFPAVLQSSGLYSLSSVVTVPSSSLGT | YYCQQFGSSPWTFGQGTKVEI |
| | | VH]:: huIgG1zSEFL2-2 | QTYICNVNHKPSNTKVDKKVEPKSCDKTHTCPPCPAPELLGGPSVFLFPPKP | KRTVAAPSVFIFPPSDEQLKSG |
| | | + [hu anti-<huTR2> | KDTLMISRTPEVTCVVVDVSHEDPEVKFNWYVDGVEVHNAKTKPCEEQY | TASVVCLLNNFYPREAKVQW |
| | | XG1-048(1-108)(Y53E) | GSTYRCVSVLTVLHQDWLNGKEYKCKVSNKALPAPIEKTISKAKGQPREP | KVDNALQSGNSQESVTEQDS |
| | | VL]:: huKLC (Fc | QVYTLPPSREEMTKNQVSLTCLVKGFYPSDIAVEWESNGQPENNYKTTPPV | KDSTYSLSSTLTLSKADYEKH |
| | | Fusion) | LDSDGSFFLYSKLTVDKSRWQQGNVFSCSVMHEALHNHYTQKSLSLSPGK | KVYACEVTHQGLSSPVTKSFN |
| | | | (SEQ ID NO: 3392) | RGEC (SEQ ID NO: 3683) |
| PL- | iPS: | huGLP-1(R30G, | HGEGTFTSDVSSYLEEQAAKEFIAWLVKGGGGSGSATGGSGSVASSGSGSA | DIQMTQSPSSLSASIGDRVTIT |
| 45556 | 412489 | G16E):: 1KmodT482V, | THLQVQLVESGGGVVQPGRSLRLSCAASGFTFSYFGMHWVRQAPGKGLE | CRASQDIRDYLGWYQQKPGK |
| PL- | | M493L):: [hu anti- | WVAVIWYDGSNKYYADSVKGRFTISRDNSKNTLYLQMNSLRAEDTAVYY | APKRLIYGASSLQSGVPSRFSG |
| 47367 | | <huGIPR> 21-143_6H1 | CARDGTIFGVLLGDYWGQGTLVTVSSASTKGPSVFPLAPSSKSTSGGTAAL | SGSGTEFTLTISSLQPEDFATY |
| | | VH]:: huIgG1z-SEFL2-2 | GCLVKDYFPEPVTVSWNSGALTSGVHTFPAVLQSSGLYSLSSVVTVPSSSL | YCLQHNNYPFTFGPGTKVDIK |
| | | + [Unknown anti- | GTQTYICNVNHKPSNTKVDKKVEPKSCDKTHTCPPCPAPELLGGPSVFLFPP | RTVAAPSVFIFPPSDEQLKSGT |
| | | <huGIPR> 21-143_4B1 | KPKDTLMISRTPEVTCVVVDVSHEDPEVKFNWYVDGVEVHNAKTKPCEEQ | ASVVCLLNNFYPREAKVQWK |
| | | VK1 (1-236) | YGSTYRCVSVLTVLHQDWLNGKEYKCKVSNKALPAPIEKTISKAKGQPRE | VDNALQSGNSQESVTEQDSK |
| | | VL]:: huKLC-CL (mAb- | PQVYTLPPSREEMTKNQVSLTCLVKGFYPSDIAVEWESNGQPENNYKTTPP | DSTYSLSSTLTLSKADYEKHK |
| | | fusion) | VLDSDGSFFLYSKLTVDKSRWQQGNVFSCSVMHEALHNHYTQKSLSLSPG | VYACEVTHQGLSSPVTKSFNR |
| | | | K (SEQ ID NO: 3393) | GEC (SEQ ID NO: 3684) |
| PL- | iPS: | huExendin4:: | HGEGTFTSDLSKQMEEEAVRLFIEWLKNGGPSSGAPPPSGSGSATGGSGSV | DIQMTQSPSSLSASIGDRVTIT |
| 45557 | 412490 | 1KmodT482V, M493L):: | ASSGSGSATHLQVQLVESGGGVVQPGRSLRLSCAASGFTFSYFGMHWVRQ | CRASQDIRDYLGWYQQKPGK |
| | | [hu anti-<huGIPR> 21- | APGKGLEWVAVIWYDGSNKYYADSVKGRFTISRDNSKNTLYLQMNSLRA | APKRLIYGASSLQSGVPSRFSG |
| | | 143_6H1 VH]:: | EDTAVYYCARDGTIFGVLLGDYWGQGTLVTVSSASTKGPSVFPLAPSSKST | SGSGTEFTLTISSLQPEDFATY |
| | | huIgG1z-SEFL2-2 | SGGTAALGCLVKDYFPEPVTVSWNSGALTSGVHTFPAVLQSSGLYSLSSVV | YCLQHNNYPFTFGPGTKVDIK |
| | | + [Unknown anti- | TVPSSSLGTQTYICNVNHKPSNTKVDKKVEPKSCDKTHTCPPCPAPELLGGP | RTVAAPSVFIFPPSDEQLKSGT |
| | | <huGIPR> 21-143_4B1 | SVFLFPPKPKDTLMISRTPEVTCVVVDVSHEDPEVKFNWYVDGVEVHNAK | ASVVCLLNNFYPREAKVQWK |
| | | VK1 (1-236) | TKPCEEQYGSTYRCVSVLTVLHQDWLNGKEYKCKVSNKALPAPIEKTISKA | VDNALQSGNSQESVTEQDSK |
| | | VL]:: huKLC-CL (mAb- | KGQPREPQVYTLPPSREEMTKNQVSLTCLVKGFYPSDIAVEWESNGQPENN | DSTYSLSSTLTLSKADYEKHK |
| | | fusion) | YKTTPPVLDSDGSFFLYSKLTVDKSRWQQGNVFSCSVMHEALHNHYTQKS | VYACEVTHQGLSSPVTKSFNR |
| | | | LSLSPGK (SEQ ID NO: 3394) | GEC (SEQ ID NO: 3685) |
| PL- | iPS: | huExendin4:: | HGEGTFTSDLSKQMEEEAVRLFIEWLKNGGPSSGAPPPSGSGSATGGSGSV | DIQMTQSPSSLSASIGDRVTIT |
| 45557 | 412490 | 1KmodT482V,M493L):: | ASSGSGSATHLQVQLVESGGGVVQPGRSLRLSCAASGFTFSYFGMHWVRQ | CRASQDIRDYLGWYQQKPGK |
| PL- | | [hu anti- | APGKGLEWVAVIWYDGSNKYYADSVKGRFTISRDNSKNTLYLQMNSLRA | APKRLIYGASSLQSGVPSRFSG |
| 45558 | | <huGIPR> 21-143_6H1 | EDTAVYYCARDGTIFGVLLGDYWGQGTLVTVSSASTKGPSVFPLAPSSKST | SGSGTEFTLTISSLQPEDFATY |
| | | VH]:: huIgG1z-SEFL2-2 | SGGTAALGCLVKDYFPEPVTVSWNSGALTSGVHTFPAVLQSSGLYSLSSVV | YCLQHNNYPFTFGPGTKVDIK |
| | | + [Unknown anti- | TVPSSSLGTQTYICNVNHKPSNTKVDKKVEPKSCDKTHTCPPCPAPELLGGP | RTVAAPSVFIFPPSDEQLKSGT |
| | | <huGIPR> 21-143_4B1 | SVFLFPPKPKDTLMISRTPEVTCVVVDVSHEDPEVKFNWYVDGVEVHNAK | ASVVCLLNNFYPREAKVQWK |
| | | VK1 (1-236) | TKPCEEQYGSTYRCVSVLTVLHQDWLNGKEYKCKVSNKALPAPIEKTISKA | VDNALQSGNSQESVTEQDSK |
| | | VL]:: huKLC-CL (mAb- | KGQPREPQVYTLPPSREEMTKNQVSLTCLVKGFYPSDIAVEWESNGQPENN | DSTYSLSSTLTLSKADYEKHK |
| | | fusion) | YKTTPPVLDSDGSFFLYSKLTVDKSRWQQGNVFSCSVMHEALHNHYTQKS | VYACEVTHQGLSSPVTKSFNR |
| | | | LSLSPGK (SEQ ID NO: 3395) | GEC (SEQ ID NO: 3686) |
| PL- | iPS: | huGLP-1(A2G, R30G):: | HGEGTFTSDVSSYLEGQAAKEFIAWLVKGGGGGGGQVQLVESGGGVVQP | DIQMTQSPSSLSASIGDRVTIT |
| 45578 | 412491 | G4:: [hu | GRSLRLSCAASGFTFSYFGMHWVRQAPGKGLEWVAVIWYDGSNKYYADS | CRASQDIRDYLGWYQQKPGK |
| | | anti-<huGIPR> 21- | VKGRFTISRDNSKNTLYLQMNSLRAEDTAVYYCARDGTIFGVLLGDYWGQ | APKRLIYGASSLQSGVPSRFSG |
| | | 143_6H1 | GTLVTVSSASTKGPSVFPLAPSSKSTSGGTAALGCLVKDYFPEPVTVSWNS | SGSGTEFTLTISSLQPEDFATY |
| | | VH]:: huIgG1zSEFL2-2 | GALTSGVHTFPAVLQSSGLYSLSSVVTVPSSSLGTQTYICNVNHKPSNTKVD | YCLQHNNYPFTFGPGTKVDIK |
| | | + [Unknown anti- | KKVEPKSCDKTHTCPPCPAPELLGGPSVFLFPPKPKDTLMISRTPEVTCVVV | RTVAAPSVFIFPPSDEQLKSGT |
| | | <huGIPR> 21-143_4B1 | DVSHEDPEVKFNWYVDGVEVHNAKTKPCEEQYGSTYRCVSVLTVLHQDW | ASVVCLLNNFYPREAKVQWK |
| | | VK1 (1-236) | LNGKEYKCKVSNKALPAPIEKTISKAKGQPREPQVYTLPPSREEMTKNQVS | VDNALQSGNSQESVTEQDSK |
| | | VL]:: huKLC-CL (mAb- | LTCLVKGFYPSDIAVEWESNGQPENNYKTTPPVLDSDGSFFLYSKLTVDKS | DSTYSLSSTLTLSKADYEKHK |
| | | fusion) | RWQQGNVFSCSVMHEALHNHYTQKSLSLSPGK (SEQ ID NO: 3396) | VYACEVTHQGLSSPVTKSFNR |
| | | | | GEC (SEQ ID NO: 3687) |
| PL- | iPS: | huGLP-1(A2G, R30G):: | HGEGTFTSDVSSYLEGQAAKEFIAWLVKGGGGGGGSGGGGQVQLVESGG | DIQMTQSPSSLSASIGDRVTIT |
| 45579 | 412493 | G4S:: G4:: | GVVQPGRSLRLSCAASGFTFSYFGMHWVRQAPGKGLEWVAVIWYDGSNK | CRASQDIRDYLGWYQQKPGK |
| | | [hu anti-<huGIPR> | YYADSVKGRFTISRDNSKNTLYLQMNSLRAEDTAVYYCARDGTIFGVLLG | APKRLIYGASSLQSGVPSRFSG |
| | | 21-143_6H1 | DYWGQGTLVTVSSASTKGPSVFPLAPSSKSTSGGTAALGCLVKDYFPEPVT | SGSGTEFTLTISSLQPEDFATY |
| | | VH]:: huIgG1zSEFL2-2 | VSWNSGALTSGVHTFPAVLQSSGLYSLSSVVTVPSSSLGTQTYICNVNHKPS | YCLQHNNYPFTFGPGTKVDIK |
| | | + [Unknown anti- | NTKVDKKVEPKSCDKTHTCPPCPAPELLGGPSVFLFPPKPKDTLMISRTPEV | RTVAAPSVFIFPPSDEQLKSGT |
| | | <huGIPR> 21-143_4B1 | TCVVVDVSHEDPEVKFNWYVDGVEVHNAKTKPCEEQYGSTYRCVSVLTV | ASVVCLLNNFYPREAKVQWK |
| | | VK1 (1-236) | LHQDWLNGKEYKCKVSNKALPAPIEKTISKAKGQPREPQVYTLPPSREEMT | VDNALQSGNSQESVTEQDSK |
| | | VL]:: huKLC-CL (mAb- | KNQVSLTCLVKGFYPSDIAVEWESNGQPENNYKTTPPVLDSDGSFFLYSKL | DSTYSLSSTLTLSKADYEKHK |
| | | fusion) | TVDKSRWQQGNVFSCSVMHEALHNHYTQKSLSLSPGK (SEQ ID NO: | VYACEVTHQGLSSPVTKSFNR |
| | | | 3397) | GEC (SEQ ID NO: 3688) |
| PL- | iPS: | huGLP-1(A2G, R30G):: | HGEGTFTSDVSSYLEGQAAKEFIAWLVKGGGGGGGAGGGGAGGGGQVQL | DIQMTQSPSSLSASIGDRVTIT |
| 45580 | 412494 | (G4A)2:: G4:: | VESGGGVVQPGRSLRLSCAASGFTFSYFGMHWVRQAPGKGLEWVAVIWY | CRASQDIRDYLGWYQQKPGK |
| | | [hu anti-<huGIPR> | DGSNKYYADSVKGRFTISRDNSKNTLYLQMNSLRAEDTAVYYCARDGTIF | APKRLIYGASSLQSGVPSRFSG |
| | | 21-143_6H1 | GVLLGDYWGQGTLVTVSSASTKGPSVFPLAPSSKSTSGGTAALGCLVKDY | SGSGTEFTLTISSLQPEDFATY |
| | | VH]:: huIgG1zSEFL2-2 | FPEPVTVSWNSGALTSGVHTFPAVLQSSGLYSLSSVVTVPSSSLGTQTYICN | YCLQHNNYPFTFGPGTKVDIK |
| | | + [Unknown anti- | VNHKPSNTKVDKKVEPKSCDKTHTCPPCPAPELLGGPSVFLFPPKPKDTLMI | RTVAAPSVFIFPPSDEQLKSGT |
| | | <huGIPR> 21-143_4B1 | SRTPEVTCVVVDVSHEDPEVKFNWYVDGVEVHNAKTKPCEEQYGSTYRC | ASVVCLLNNFYPREAKVQWK |
| | | VK1 (1-236) | VSVLTVLHQDWLNGKEYKCKVSNKALPAPIEKTISKAKGQPREPQVYTLPP | VDNALQSGNSQESVTEQDSK |
| | | VL]:: huKLC-CL (mAb- | SREEMTKNQVSLTCLVKGFYPSDIAVEWESNGQPENNYKTTPPVLDSDGSF | DSTYSLSSTLTLSKADYEKHK |
| | | fusion) | FLYSKLTVDKSRWQQGNVFSCSVMHEALHNHYTQKSLSLSPGK (SEQ ID | VYACEVTHQGLSSPVTKSFNR |
| | | | NO: 3398) | GEC (SEQ ID NO: 3689) |
| PL- | iPS: | huGLP-1(A2G, R30G):: | HGEGTFTSDVSSYLEGQAAKEFIAWLVKGGGGGGGAGGGGAGGGGAGG | DIQMTQSPSSLSASIGDRVTIT |
| 45576 | 412724 | (G4A)4:: G4:: | GGQVQLVESGGGVVQPGRSLRLSCAASGFTFSYFGMHWVRQAPGKGLEW | CRASQDIRDYLGWYQQKPGK |
| | | [hu anti-<huGIPR> | VAVIWYDGSNKYYADSVKGRFTISRDNSKNTLYLQMNSLRAEDTAVYYC | APKRLIYGASSLQSGVPSRFSG |
| | | 21-143_6H1 | ARDGTIFGVLLGDYWGQGTLVTVSSASTKGPSVFPLAPSSKSTSGGTAALG | SGSGTEFTLTISSLQPEDFATY |
| | | VH]:: huIgG1zSEFL2-2 | CLVKDYFPEPVTVSWNSGALTSGVHTFPAVLQSSGLYSLSSVVTVPSSSLGT | YCLQHNNYPFTFGPGTKVDIK |
| | | + [Unknown anti- | QTYICNVNHKPSNTKVDKKVEPKSCDKTHTCPPCPAPELLGGPSVFLFPPKP | RTVAAPSVFIFPPSDEQLKSGT |
| | | <huGIPR> 21-143_4B1 | KDTLMISRTPEVTCVVVDVSHEDPEVKFNWYVDGVEVHNAKTKPCEEQY | ASVVCLLNNFYPREAKVQWK |
| | | VK1 (1-236) | GSTYRCVSVLTVLHQDWLNGKEYKCKVSNKALPAPIEKTISKAKGQPREP | VDNALQSGNSQESVTEQDSK |
| | | VL]:: huKLC-CL (mAb- | QVYTLPPSREEMTKNQVSLTCLVKGFYPSDIAVEWESNGQPENNYKTTPPV | DSTYSLSSTLTLSKADYEKHK |
| | | fusion) | LDSDGSFFLYSKLTVDKSRWQQGNVFSCSVMHEALHNHYTQKSLSLSPGK | VYACEVTHQGLSSPVTKSFNR |
| | | | (SEQ ID NO: 3399) | GEC (SEQ ID NO: 3690) |
| PL- | iPS: | huGLP-1(A2G, R30G):: | HGEGTFTSDVSSYLEGQAAKEFIAWLVKGGGGAPAPAPAPGQVQLVESGG | DIQMTQSPSSLSASIGDRVTIT |
| 45577 | 412725 | G:: (AP)4:: G:: | GVVQPGRSLRLSCAASGFTFSYFGMHWVRQAPGKGLEWVAVIWYDGSNK | CRASQDIRDYLGWYQQKPGK |
| | | [hu anti-<huGIPR> | YYADSVKGRFTISRDNSKNTLYLQMNSLRAEDTAVYYCARDGTIFGVLLG | APKRLIYGASSLQSGVPSRFSG |
| | | 21-143_6H1 | DYWGQGTLVTVSSASTKGPSVFPLAPSSKSTSGGTAALGCLVKDYFPEPVT | SGSGTEFTLTISSLQPEDFATY |
| | | VH]:: huIgG1zSEFL2-2 | VSWNSGALTSGVHTFPAVLQSSGLYSLSSVVTVPSSSLGTQTYICNVNHKPS | YCLQHNNYPFTFGPGTKVDIK |
| | | + [Unknown anti- | NTKVDKKVEPKSCDKTHTCPPCPAPELLGGPSVFLFPPKPKDTLMISRTPEV | RTVAAPSVFIFPPSDEQLKSGT |
| | | <huGIPR> 21-143_4B1 | TCVVVDVSHEDPEVKFNWYVDGVEVHNAKTKPCEEQYGSTYRCVSVLTV | ASVVCLLNNFYPREAKVQWK |
| | | VK1 (1-236) | LHQDWLNGKEYKCKVSNKALPAPIEKTISKAKGQPREPQVYTLPPSREEMT | VDNALQSGNSQESVTEQDSK |
| | | VL]:: huKLC-CL (mAb- | KNQVSLTCLVKGFYPSDIAVEWESNGQPENNYKTTPPVLDSDGSFFLYSKL | DSTYSLSSTLTLSKADYEKHK |
| | | fusion) | TVDKSRWQQGNVFSCSVMHEALHNHYTQKSLSLSPGK (SEQ ID NO: | VYACEVTHQGLSSPVTKSFNR |
| | | | 3400) | GEC (SEQ ID NO: 3691) |
| PL- | iPS: | huGLP-1(A2G, R30G):: | HGEGTFTSDVSSYLEGQAAKEFIAWLVKGGGGAPAPAPAPAPAPGQVQLV | DIQMTQSPSSLSASIGDRVTIT |
| 45581 | 412726 | G:: (AP)6:: G:: | ESGGGVVQPGRSLRLSCAASGFTFSYFGMHWVRQAPGKGLEWVAVIWYD | CRASQDIRDYLGWYQQKPGK |
| | | [hu anti-<huGIPR> | GSNKYYADSVKGRFTISRDNSKNTLYLQMNSLRAEDTAVYYCARDGTIFG | APKRLIYGASSLQSGVPSRFSG |
| | | 21-143_6H1 | VLLGDYWGQGTLVTVSSASTKGPSVFPLAPSSKSTSGGTAALGCLVKDYFP | SGSGTEFTLTISSLQPEDFATY |
| | | VH]: :huIgG1zSEFL2-2 | EPVTVSWNSGALTSGVHTFPAVLQSSGLYSLSSVVTVPSSSLGTQTYICNVN | YCLQHNNYPFTFGPGTKVDIK |
| | | + [Unknown anti- | HKPSNTKVDKKVEPKSCDKTHTCPPCPAPELLGGPSVFLFPPKPKDTLMISR | RTVAAPSVFIFPPSDEQLKSGT |
| | | <huGIPR> 21-143_4B1 | TPEVTCVVVDVSHEDPEVKFNWYVDGVEVHNAKTKPCEEQYGSTYRCVS | ASVVCLLNNFYPREAKVQWK |
| | | VK1 (1-236) | VLTVLHQDWLNGKEYKCKVSNKALPAPIEKTISKAKGQPREPQVYTLPPSR | VDNALQSGNSQESVTEQDSK |
| | | VL]:: huKLC-CL (mAb- | EEMTKNQVSLTCLVKGFYPSDIAVEWESNGQPENNYKTTPPVLDSDGSFFL | DSTYSLSSTLTLSKADYEKHK |
| | | fusion) | YSKLTVDKSRWQQGNVFSCSVMHEALHNHYTQKSLSLSPGK (SEQ ID | VYACEVTHQGLSSPVTKSFNR |
| | | | NO: 3401) | GEC (SEQ ID NO: 3692) |
| PL- | iPS: | huGLP-1(A2G, R30G):: | HGEGTFTSDVSSYLEGQAAKEFIAWLVKGGGGAPAPAPAPAPAPAPAPGQ | DIQMTQSPSSLSASIGDRVTIT |
| 45582 | 412727 | G:: (AP)8:: G:: | VQLVESGGGVVQPGRSLRLSCAASGFTFSYFGMHWVRQAPGKGLEWVAV | CRASQDIRDYLGWYQQKPGK |
| | | [hu anti-<huGIPR> | IWYDGSNKYYADSVKGRFTISRDNSKNTLYLQMNSLRAEDTAVYYCARD | APKRLIYGASSLQSGVPSRFSG |
| | | 21-143_6H1 | GTIFGVLLGDYWGQGTLVTVSSASTKGPSVFPLAPSSKSTSGGTAALGCLV | SGSGTEFTLTISSLQPEDFATY |
| | | VH]:: huIgG1zSEFL2-2 | KDYFPEPVTVSWNSGALTSGVHTFPAVLQSSGLYSLSSVVTVPSSSLGTQT | YCLQHNNYPFTFGPGTKVDIK |
| | | + [Unknown anti- | YICNVNHKPSNTKVDKKVEPKSCDKTHTCPPCPAPELLGGPSVFLFPPKPKD | RTVAAPSVFIFPPSDEQLKSGT |
| | | <huGIPR> 21-143_4B1 | TLMISRTPEVTCVVVDVSHEDPEVKFNWYVDGVEVHNAKTKPCEEQYGST | ASVVCLLNNFYPREAKVQWK |
| | | VK1 (1-236) | YRCVSVLTVLHQDWLNGKEYKCKVSNKALPAPIEKTISKAKGQPREPQVY | VDNALQSGNSQESVTEQDSK |
| | | VL]:: huKLC-CL (mAb- | TLPPSREEMTKNQVSLTCLVKGFYPSDIAVEWESNGQPENNYKTTPPVLDS | DSTYSLSSTLTLSKADYEKHK |
| | | fusion) | DGSFFLYSKLTVDKSRWQQGNVFSCSVMHEALHNHYTQKSLSLSPGK | VYACEVTHQGLSSPVTKSFNR |
| | | | (SEQ ID NO: 3402) | GEC (SEQ ID NO: 3693) |
| PL- | iPS: | huGLP-1(A2G, R30G):: | HGEGTFTSDVSSYLEGQAAKEFIAWLVKGGGGAPAPAPAPAPAPAPAPAPA | DIQMTQSPSSLSASIGDRVTIT |
| 45583 | 412728 | G:: (AP)10:: G:: | PGQVQLVESGGGVVQPGRSLRLSCAASGFTFSYFGMHWVRQAPGKGLEW | CRASQDIRDYLGWYQQKPGK |
| | | [hu anti- | VAVIWYDGSNKYYADSVKGRFTISRDNSKNTLYLQMNSLRAEDTAVYYC | APKRLIYGASSLQSGVPSRFSG |
| | | <huGIPR> 21-143_6H1 | ARDGTIFGVLLGDYWGQGTLVTVSSASTKGPSVFPLAPSSKSTSGGTAALG | SGSGTEFTLTISSLQPEDFATY |
| | | VH]:huIgG1zSEFL2-2 | CLVKDYFPEPVTVSWNSGALTSGVHTFPAVLQSSGLYSLSSVVTVPSSSLGT | YCLQHNNYPFTFGPGTKVDIK |
| | | + [Unknown anti- | QTYICNVNHKPSNTKVDKKVEPKSCDKTHTCPPCPAPELLGGPSVFLFPPKP | RTVAAPSVFIFPPSDEQLKSGT |
| | | <huGIPR> 21-143_4B1 | KDTLMISRTPEVTCVVVDVSHEDPEVKFNWYVDGVEVHNAKTKPCEEQY | ASVVCLLNNFYPREAKVQWK |
| | | VK1 (1-236) | GSTYRCVSVLTVLHQDWLNGKEYKCKVSNKALPAPIEKTISKAKGQPREP | VDNALQSGNSQESVTEQDSK |
| | | VL]:: huKLC-CL (mAb- | QVYTLPPSREEMTKNQVSLTCLVKGFYPSDIAVEWESNGQPENNYKTTPPV | DSTYSLSSTLTLSKADYEKHK |
| | | fusion) | LDSDGSFFLYSKLTVDKSRWQQGNVFSCSVMHEALHNHYTQKSLSLSPGK | VYACEVTHQGLSSPVTKSFNR |
| | | | (SEQ ID NO: 3403) | GEC (SEQ ID NO: 3694) |
| PL- | iPS: | huGLP-1(A2V, R30G):: | HVEGTFTSDVSSYLEGQAAKEFIAWLVKGGGGSGSATGGSGSVASSGSGS | DIQMTQSPSSLSASIGDRVTIT |
| 45559 | 412729 | 1KmodT482V, | ATHLQVQLVESGGGVVQPGRSLRLSCAASGFTFSYFGMHWVRQAPGKGL | CRASQDIRDYLGWYQQKPGK |
| | | M493L):: [hu anti- | EWVAVIWYDGSNKYYADSVKGRFTISRDNSKNTLYLQMNSLRAEDTAVY | APKRLIYGASSLQSGVPSRFSG |
| | | <huGIPR> 21-143_6H1 | YCARDGTIFGVLLGDYWGQGTLVTVSSASTKGPSVFPLAPSSKSTSGGTAA | SGSGTEFTLTISSLQPEDFATY |
| | | VH]:: huIgG1zSEFL2-2 | LGCLVKDYFPEPVTVSWNSGALTSGVHTFPAVLQSSGLYSLSSVVTVPSSSL | YCLQHNNYPFTFGPGTKVDIK |
| | | + [Unknown anti- | GTQTYICNVNHKPSNTKVDKKVEPKSCDKTHTCPPCPAPELLGGPSVFLFPP | RTVAAPSVFIFPPSDEQLKSGT |
| | | <huGIPR> 21-143_4B1 | KPKDTLMISRTPEVTCVVVDVSHEDPEVKFNWYVDGVEVHNAKTKPCEEQ | ASVVCLLNNFYPREAKVQWK |
| | | VK1 (1-236) | YGSTYRCVSVLTVLHQDWLNGKEYKCKVSNKALPAPIEKTISKAKGQPRE | VDNALQSGNSQESVTEQDSK |
| | | VL]:: huKLC-CL (mAb- | PQVYTLPPSREEMTKNQVSLTCLVKGFYPSDIAVEWESNGQPENNYKTTPP | DSTYSLSSTLTLSKADYEKHK |
| | | fusion) | VLDSDGSFFLYSKLTVDKSRWQQGNVFSCSVMHEALHNHYTQKSLSLSPG | VYACEVTHQGLSSPVTKSFNR |
| | | | K (SEQ ID NO: 3404) | GEC (SEQ ID NO: 3695) |
| PL- | iPS: | huGLP-1(A2S, R30G):: | HSEGTFTSDVSSYLEGQAAKEFIAWLVKGGGGSGSATGGSGSVASSGSGSA | DIQMTQSPSSLSASIGDRVTIT |
| 45560 | 412756 | 1KmodT482V, | THLQVQLVESGGGVVQPGRSLRLSCAASGFTFSYFGMHWVRQAPGKGLE | CRASQDIRDYLGWYQQKPGK |
| | | M493L):: [hu anti- | WVAVIWYDGSNKYYADSVKGRFTISRDNSKNTLYLQMNSLRAEDTAVYY | APKRLIYGASSLQSGVPSRFSG |
| | | <huGIPR> 21-143_6H1 | CARDGTIFGVLLGDYWGQGTLVTVSSASTKGPSVFPLAPSSKSTSGGTAAL | SGSGTEFTLTISSLQPEDFATY |
| | | VH]:: huIgG1zSEFL2-2 | GCLVKDYFPEPVTVSWNSGALTSGVHTFPAVLQSSGLYSLSSVVTVPSSSL | YCLQHNNYPFTFGPGTKVDIK |
| | | + [Unknown anti- | GTQTYICNVNHKPSNTKVDKKVEPKSCDKTHTCPPCPAPELLGGPSVFLFPP | RTVAAPSVFIFPPSDEQLKSGT |
| | | <huGIPR> 21-143_4B1 | KPKDTLMISRTPEVTCVVVDVSHEDPEVKFNWYVDGVEVHNAKTKPCEEQ | ASVVCLLNNFYPREAKVQWK |
| | | VK1 (1-236) | YGSTYRCVSVLTVLHQDWLNGKEYKCKVSNKALPAPIEKTISKAKGQPRE | VDNALQSGNSQESVTEQDSK |
| | | VL]:: huKLC-CL (mAb- | PQVYTLPPSREEMTKNQVSLTCLVKGFYPSDIAVEWESNGQPENNYKTTPP | DSTYSLSSTLTLSKADYEKHK |
| | | fusion) | VLDSDGSFFLYSKLTVDKSRWQQGNVFSCSVMHEALHNHYTQKSLSLSPG | VYACEVTHQGLSSPVTKSFNR |
| | | | K (SEQ ID NO: 3405) | GEC (SEQ ID NO: 3696) |
| PL- | iPS: | huGLP-1(A2G, E3Q, | HGQGTFTSDVSSYLEGQAAKEFIAWLVKGGGGSGSATGGSGSVASSGSGS | DIQMTQSPSSLSASIGDRVTIT |
| 45561 | 412757 | R30G):: 1KmodT482V, | ATHLQVQLVESGGGVVQPGRSLRLSCAASGFTFSYFGMHWVRQAPGKGL | CRASQDIRDYLGWYQQKPGK |
| | | M493L):: [hu | EWVAVIWYDGSNKYYADSVKGRFTISRDNSKNTLYLQMNSLRAEDTAVY | APKRLIYGASSLQSGVPSRFSG |
| | | anti-<huGIPR> 21- | YCARDGTIFGVLLGDYWGQGTLVTVSSASTKGPSVFPLAPSSKSTSGGTAA | SGSGTEFTLTISSLQPEDFATY |
| | | 143_6H1 | LGCLVKDYFPEPVTVSWNSGALTSGVHTFPAVLQSSGLYSLSSVVTVPSSSL | YCLQHNNYPFTFGPGTKVDIK |
| | | VH]:: huIgG1zSEFL2-2 | GTQTYICNVNHKPSNTKVDKKVEPKSCDKTHTCPPCPAPELLGGPSVFLFPP | RTVAAPSVFIFPPSDEQLKSGT |
| | | + [Unknown anti- | KPKDTLMISRTPEVTCVVVDVSHEDPEVKFNWYVDGVEVHNAKTKPCEEQ | ASVVCLLNNFYPREAKVQWK |
| | | <huGIPR> 21-143_4B1 | YGSTYRCVSVLTVLHQDWLNGKEYKCKVSNKALPAPIEKTISKAKGQPRE | VDNALQSGNSQESVTEQDSK |
| | | VK1 (1-236) | PQVYTLPPSREEMTKNQVSLTCLVKGFYPSDIAVEWESNGQPENNYKTTPP | DSTYSLSSTLTLSKADYEKHK |
| | | VL]:: huKLC-CL (mAb- | VLDSDGSFFLYSKLTVDKSRWQQGNVFSCSVMHEALHNHYTQKSLSLSPG | VYACEVTHQGLSSPVTKSFNR |
| | | fusion) | K (SEQ ID NO: 3406) | GEC (SEQ ID NO: 3697) |
| PL- | iPS: | huGLP-1(A2V, E3Q, | HVQGTFTSDVSSYLEGQAAKEFIAWLVKGGGGSGSATGGSGSVASSGSGS | DIQMTQSPSSLSASIGDRVTIT |
| 45562 | 412758 | R30G):: 1KmodT482V, | ATHLQVQLVESGGGVVQPGRSLRLSCAASGFTFSYFGMHWVRQAPGKGL | CRASQDIRDYLGWYQQKPGK |
| | | M493L):: [hu | EWVAVIWYDGSNKYYADSVKGRFTISRDNSKNTLYLQMNSLRAEDTAVY | APKRLIYGASSLQSGVPSRFSG |
| | | anti-<huGIPR> 21- | YCARDGTIFGVLLGDYWGQGTLVTVSSASTKGPSVFPLAPSSKSTSGGTAA | SGSGTEFTLTISSLQPEDFATY |
| | | 143_6H1 | LGCLVKDYFPEPVTVSWNSGALTSGVHTFPAVLQSSGLYSLSSVVTVPSSSL | YCLQHNNYPFTFGPGTKVDIK |
| | | VH]:: huIgG1zSEFL2-2 | GTQTYICNVNHKPSNTKVDKKVEPKSCDKTHTCPPCPAPELLGGPSVFLFPP | RTVAAPSVFIFPPSDEQLKSGT |
| | | + [Unknown anti- | KPKDTLMISRTPEVTCVVVDVSHEDPEVKFNWYVDGVEVHNAKTKPCEEQ | ASVVCLLNNFYPREAKVQWK |
| | | <huGIPR> 21-143_4B1 | YGSTYRCVSVLTVLHQDWLNGKEYKCKVSNKALPAPIEKTISKAKGQPRE | VDNALQSGNSQESVTEQDSK |
| | | VK1 (1-236) | PQVYTLPPSREEMTKNQVSLTCLVKGFYPSDIAVEWESNGQPENNYKTTPP | DSTYSLSSTLTLSKADYEKHK |
| | | VL]:: huKLC-CL (mAb- | VLDSDGSFFLYSKLTVDKSRWQQGNVFSCSVMHEALHNHYTQKSLSLSPG | VYACEVTHQGLSSPVTKSFNR |
| | | fusion) | K (SEQ ID NO: 3407) | GEC (SEQ ID NO: 3698) |
| PL- | iPS: | huGLP-1(A2S, E3Q, | HSQGTFTSDVSSYLEGQAAKEFIAWLVKGGGGSGSATGGSGSVASSGSGSA | DIQMTQSPSSLSASIGDRVTIT |
| 45563 | 412759 | R30G):: 1KmodT482V, | THLQVQLVESGGGVVQPGRSLRLSCAASGFTFSYFGMHWVRQAPGKGLE | CRASQDIRDYLGWYQQKPGK |
| | | M493L):: [hu | WVAVIWYDGSNKYYADSVKGRFTISRDNSKNTLYLQMNSLRAEDTAVYY | APKRLIYGASSLQSGVPSRFSG |
| | | anti-<huGIPR> 21- | CARDGTIFGVLLGDYWGQGTLVTVSSASTKGPSVFPLAPSSKSTSGGTAAL | SGSGTEFTLTISSLQPEDFATY |
| | | 143_6H1 | GCLVKDYFPEPVTVSWNSGALTSGVHTFPAVLQSSGLYSLSSVVTVPSSSL | YCLQHNNYPFTFGPGTKVDIK |
| | | VH]:: huIgG1zSEFL2-2 | GTQTYICNVNHKPSNTKVDKKVEPKSCDKTHTCPPCPAPELLGGPSVFLFPP | RTVAAPSVFIFPPSDEQLKSGT |
| | | + [Unknown anti- | KPKDTLMISRTPEVTCVVVDVSHEDPEVKFNWYVDGVEVHNAKTKPCEEQ | ASVVCLLNNFYPREAKVQWK |
| | | <huGIPR> 21-143_4B1 | YGSTYRCVSVLTVLHQDWLNGKEYKCKVSNKALPAPIEKTISKAKGQPRE | VDNALQSGNSQESVTEQDSK |
| | | VK1 (1-236) | PQVYTLPPSREEMTKNQVSLTCLVKGFYPSDIAVEWESNGQPENNYKTTPP | DSTYSLSSTLTLSKADYEKHK |
| | | VL]:: huKLC-CL (mAb- | VLDSDGSFFLYSKLTVDKSRWQQGNVFSCSVMHEALHNHYTQKSLSLSPG | VYACEVTHQGLSSPVTKSFNR |
| | | fusion) | K (SEQ ID NO: 3408) | GEC (SEQ ID NO: 3699) |
| PL- | iPS: | [hu anti-<huGIPR> | QVQLVESGGGVVQPGRSLRLSCAASGFTFSNYGMHWVRQAPGEGLEWVA | EIVMTQSPATLSVSPGERATLS |
| 46301 | 420578 | 21-143_2G10_LC1.003 | AIWFDASDKYYADAVKGRFTISRDNSKNTLYLQMNSLRAEDTAVYYCAR | CRASQSVSSNLAWYQQKPGQ |
| | | VH3 (1-472) | DQAIFGVVPDYWGQGTLVTVSSASTKGPSVFPLAPSSKSTSGGTAALGCLV | APRLLIYGAATRATGIPARVS |
| | | (S73(85)A, | KDYFPEPVTVSWNSGALTSGVHTFPAVLQSSGLYSLSSVVTVPSSSLGTQT | GSGSGTEFTLTISSLQSEDFAV |
| | | G65(77)A) | YICNVNHKPSNTKVDKKVEPKSCDKTHTCPPCPAPELLGGPSVFLFPPKPKD | YYCQQYNNWPLTFGGGTKVE |
| | | VH]:: huIgG1zSEFL2- | TLMISRTPEVTCVVVDVSHEDPCVKFNWYVDGVEVHNAKTKPCEEQYGST | IKRTVAAPSVFIFPPSDEQLKS |
| | | 2_E384C + [Unknown | YRCVSVLTVLHQDWLNGKEYKCKVSNKALPAPIEKTISKAKGQPREPQVY | GTASVVCLLNNFYPREAKVQ |
| | | anti-<huGIPR> 21- | TLPPSREEMTKNQVSLTCLVKGFYPSDIAVEWESNGQPENNYKTTPPVLDS | WKVDNALQSGNSQESVTEQD |
| | | 143_2G10_LC1 VK3 | DGSFFLYSKLTVDKSRWQQGNVFSCSVMHEALHNHYTQKSLSLSPGK | SKDSTYSLSSTLTLSKADYEK |
| | | (1-236) VL]:: huKLC- | (SEQ ID NO: 3409) | HKVYACEVTHQGLSSPVTKSF |
| | | CL (mAb) | | NRGEC (SEQ ID NO: 3700) |
| PL- | iPS: | [hu anti-<huGIPR> | QVQLVESGGGVVQPGRSLRLSCAASGFTFSNYGMHWVRQAPGEGLEWVA | EIVMTQSPATLSVSPGERATLS |
| 48080 | 420578 | 21-143_2G10_LC1.003 | AIWFDASDKYYADAVKGRFTISRDNSKNTLYLQMNSLRAEDTAVYYCAR | CRASQSVSSNLAWYQQKPGQ |
| | | VH3 (1- | DQAIFGVVPDYWGQGTLVTVSSASTKGPSVFPLAPSSKSTSGGTAALGCLV | APRLLIYGAATRATGIPARVS |
| | | 472)(S73(85)A, | KDYFPEPVTVSWNSGALTSGVHTFPAVLQSSGLYSLSSVVTVPSSSLGTQT | GSGSGTEFTLTISSLQSEDFAV |
| | | G65(77)A) | YICNVNHKPSNTKVDKKVEPKSCDKTHTCPPCPAPELLGGPSVFLFPPKPKD | YYCQQYNNWPLTFGGGTKVE |
| | | VH]:: huIgG1zSEFL2- | TLMISRTPEVTCVVVDVSHEDPCVKFNWYVDGVEVHNAKTKPCEEQYGST | IKRTVAAPSVFIFPPSDEQLKS |
| | | 2_E384C + [Unknown | YRCVSVLTVLHQDWLNGKEYKCKVSNKALPAPIEKTISKAKGQPREPQVY | GTASVVCLLNNFYPREAKVQ |
| | | anti-<huGIPR> 21- | TLPPSREEMTKNQVSLTCLVKGFYPSDIAVEWESNGQPENNYKTTPPVLDS | WKVDNALQSGNSQESVTEQD |
| | | 143_2G10_LC1 VK3 | DGSFFLYSKLTVDKSRWQQGNVFSCSVMHEALHNHYTQKSLSLSPGK | SKDSTYSLSSTLTLSKADYEK |
| | | (1-236) VL]:: huKLC- | (SEQ ID NO: 3410) | HKVYACEVTHQGLSSPVTKSF |
| | | CL (mAb) | | NRGEC (SEQ ID NO: 3701) |
| PL- | iPS: | huGLP-1(A2V, E3D, | HVDGTFTSDVSSYLEGQAAKEFIAWLVKGGGGSGSATGGSGSVASSGSGS | DIQMTQSPSSLSASIGDRVTIT |
| 45564 | 422050 | R30G):: 1KmodT482V, | ATHLQVQLVESGGGVVQPGRSLRLSCAASGFTFSYFGMHWVRQAPGKGL | CRASQDIRDYLGWYQQKPGK |
| | | M493L):: [hu | EWVAVIWYDGSNKYYADSVKGRFTISRDNSKNTLYLQMNSLRAEDTAVY | APKRLIYGASSLQSGVPSRFSG |
| | | anti-<huGIPR> 21- | YCARDGTIFGVLLGDYWGQGTLVTVSSASTKGPSVFPLAPSSKSTSGGTAA | SGSGTEFTLTISSLQPEDFATY |
| | | 143_6H1 | LGCLVKDYFPEPVTVSWNSGALTSGVHTFPAVLQSSGLYSLSSVVTVPSSSL | YCLQHNNYPFTFGPGTKVDIK |
| | | VH]:: huIgG1zSEFL2-2 | GTQTYICNVNHKPSNTKVDKKVEPKSCDKTHTCPPCPAPELLGGPSVFLFPP | RTVAAPSVFIFPPSDEQLKSGT |
| | | + [Unknown anti- | KPKDTLMISRTPEVTCVVVDVSHEDPEVKFNWYVDGVEVHNAKTKPCEEQ | ASVVCLLNNFYPREAKVQWK |
| | | <huGIPR> 21-143_4B1 | YGSTYRCVSVLTVLHQDWLNGKEYKCKVSNKALPAPIEKTISKAKGQPRE | VDNALQSGNSQESVTEQDSK |
| | | VK1 (1-236) | PQVYTLPPSREEMTKNQVSLTCLVKGFYPSDIAVEWESNGQPENNYKTTPP | DSTYSLSSTLTLSKADYEKHK |
| | | VL]:: huKLC-CL (mAb- | VLDSDGSFFLYSKLTVDKSRWQQGNVFSCSVMHEALHNHYTQKSLSLSPG | VYACEVTHQGLSSPVTKSFNR |
| | | fusion) | K (SEQ ID NO: 3411) | GEC (SEQ ID NO: 3702) |
| PL- | iPS: | huGLP-1(A2G, E3H, | HGHGTFTSDVSSYLEGQAAKEFIAWLVKGGGGSGSATGGSGSVASSGSGS | DIQMTQSPSSLSASIGDRVTIT |
| 45565 | 422056 | R30G):: 1KmodT482V, | ATHLQVQLVESGGGVVQPGRSLRLSCAASGFTFSYFGMHWVRQAPGKGL | CRASQDIRDYLGWYQQKPGK |
| | | M493L):: [hu | EWVAVIWYDGSNKYYADSVKGRFTISRDNSKNTLYLQMNSLRAEDTAVY | APKRLIYGASSLQSGVPSRFSG |
| | | anti-<huGIPR> 21- | YCARDGTIFGVLLGDYWGQGTLVTVSSASTKGPSVFPLAPSSKSTSGGTAA | SGSGTEFTLTISSLQPEDFATY |
| | | 143_6H1 | LGCLVKDYFPEPVTVSWNSGALTSGVHTFPAVLQSSGLYSLSSVVTVPSSSL | YCLQHNNYPFTFGPGTKVDIK |
| | | VH]:: huIgG1zSEFL2-2 | GTQTYICNVNHKPSNTKVDKKVEPKSCDKTHTCPPCPAPELLGGPSVFLFPP | RTVAAPSVFIFPPSDEQLKSGT |
| | | + [Unknown anti- | KPKDTLMISRTPEVTCVVVDVSHEDPEVKFNWYVDGVEVHNAKTKPCEEQ | ASVVCLLNNFYPREAKVQWK |
| | | <huGIPR> 21-143_4B1 | YGSTYRCVSVLTVLHQDWLNGKEYKCKVSNKALPAPIEKTISKAKGQPRE | VDNALQSGNSQESVTEQDSK |
| | | VK1 (1-236) | PQVYTLPPSREEMTKNQVSLTCLVKGFYPSDIAVEWESNGQPENNYKTTPP | DSTYSLSSTLTLSKADYEKHK |
| | | VL]:: huKLC-CL (mAb- | VLDSDGSFFLYSKLTVDKSRWQQGNVFSCSVMHEALHNHYTQKSLSLSPG | VYACEVTHQGLSSPVTKSFNR |
| | | fusion) | K (SEQ ID NO: 3412) | GEC (SEQ ID NO: 3703) |
| PL- | iPS: | huGLP-1(A2G, E3H, | HGHGTFTSDVSSYLEGQAAKEFIAWLVKGGGGSGSATGGSGSVASSGSGS | DIQMTQSPSSLSASIGDRVTIT |
| 45565 | 422056 | R30G):: 1KmodT482V, | ATHLQVQLVESGGGVVQPGRSLRLSCAASGFTFSYFGMHWVRQAPGKGL | CRASQDIRDYLGWYQQKPGK |
| PL- | | M493L):: [hu | EWVAVIWYDGSNKYYADSVKGRFTISRDNSKNTLYLQMNSLRAEDTAVY | APKRLIYGASSLQSGVPSRFSG |
| 45566 | | anti-<huGIPR> 21- | YCARDGTIFGVLLGDYWGQGTLVTVSSASTKGPSVFPLAPSSKSTSGGTAA | SGSGTEFTLTISSLQPEDFATY |
| | | 143_6H1 | LGCLVKDYFPEPVTVSWNSGALTSGVHTFPAVLQSSGLYSLSSVVTVPSSSL | YCLQHNNYPFTFGPGTKVDIK |
| | | VH]:: huIgG1zSEFL2-2 | GTQTYICNVNHKPSNTKVDKKVEPKSCDKTHTCPPCPAPELLGGPSVFLFPP | RTVAAPSVFIFPPSDEQLKSGT |
| | | + [Unknown anti- | KPKDTLMISRTPEVTCVVVDVSHEDPEVKFNWYVDGVEVHNAKTKPCEEQ | ASVVCLLNNFYPREAKVQWK |
| | | <huGIPR> 21-143_4B1 | YGSTYRCVSVLTVLHQDWLNGKEYKCKVSNKALPAPIEKTISKAKGQPRE | VDNALQSGNSQESVTEQDSK |
| | | VK1 (1-236) | PQVYTLPPSREEMTKNQVSLTCLVKGFYPSDIAVEWESNGQPENNYKTTPP | DSTYSLSSTLTLSKADYEKHK |
| | | VL]:: huKLC-CL (mAb- | VLDSDGSFFLYSKLTVDKSRWQQGNVFSCSVMHEALHNHYTQKSLSLSPG | VYACEVTHQGLSSPVTKSFNR |
| | | fusion) | K (SEQ ID NO: 3413) | GEC (SEQ ID NO: 3704) |
| PL- | iPS: | huGLP-1(A2V, E3H, | HVHGTFTSDVSSYLEGQAAKEFIAWLVKGGGGSGSATGGSGSVASSGSGS | DIQMTQSPSSLSASIGDRVTIT |
| 45567 | 422058 | R30G):: 1KmodT482V, | ATHLQVQLVESGGGVVQPGRSLRLSCAASGFTFSYFGMHWVRQAPGKGL | CRASQDIRDYLGWYQQKPGK |
| PL- | | M493L):: [hu | EWVAVIWYDGSNKYYADSVKGRFTISRDNSKNTLYLQMNSLRAEDTAVY | APKRLIYGASSLQSGVPSRFSG |
| 45568 | | anti-<huGIPR> 21- | YCARDGTIFGVLLGDYWGQGTLVTVSSASTKGPSVFPLAPSSKSTSGGTAA | SGSGTEFTLTISSLQPEDFATY |
| | | 143_6H1 | LGCLVKDYFPEPVTVSWNSGALTSGVHTFPAVLQSSGLYSLSSVVTVPSSSL | YCLQHNNYPFTFGPGTKVDIK |
| | | VH]:: huIgG1zSEFL2-2 | GTQTYICNVNHKPSNTKVDKKVEPKSCDKTHTCPPCPAPELLGGPSVFLFPP | RTVAAPSVFIFPPSDEQLKSGT |
| | | + [Unknown anti- | KPKDTLMISRTPEVTCVVVDVSHEDPEVKFNWYVDGVEVHNAKTKPCEEQ | ASVVCLLNNFYPREAKVQWK |
| | | <huGIPR> 21-143_4B1 | YGSTYRCVSVLTVLHQDWLNGKEYKCKVSNKALPAPIEKTISKAKGQPRE | VDNALQSGNSQESVTEQDSK |
| | | VK1 (1-236) | PQVYTLPPSREEMTKNQVSLTCLVKGFYPSDIAVEWESNGQPENNYKTTPP | DSTYSLSSTLTLSKADYEKHK |
| | | VL]:: huKLC-CL (mAb- | VLDSDGSFFLYSKLTVDKSRWQQGNVFSCSVMHEALHNHYTQKSLSLSPG | VYACEVTHQGLSSPVTKSFNR |
| | | fusion) | K (SEQ ID NO: 3414) | GEC (SEQ ID NO: 3705) |
| PL- | iPS: | huGLP-1(A2S, E3H, | HSHGTFTSDVSSYLEGQAAKEFIAWLVKGGGGSGSATGGSGSVASSGSGSA | DIQMTQSPSSLSASIGDRVTIT |
| 45569 | 422062 | R30G):: 1KmodT482V, | THLQVQLVESGGGVVQPGRSLRLSCAASGFTFSYFGMHWVRQAPGKGLE | CRASQDIRDYLGWYQQKPGK |
| | | M493L):: [hu | WVAVIWYDGSNKYYADSVKGRFTISRDNSKNTLYLQMNSLRAEDTAVYY | APKRLIYGASSLQSGVPSRFSG |
| | | anti-<huGIPR> 21- | CARDGTIFGVLLGDYWGQGTLVTVSSASTKGPSVFPLAPSSKSTSGGTAAL | SGSGTEFTLTISSLQPEDFATY |
| | | 143_6H1 | GCLVKDYFPEPVTVSWNSGALTSGVHTFPAVLQSSGLYSLSSVVTVPSSSL | YCLQHNNYPFTFGPGTKVDIK |
| | | VH]:: huIgG1zSEFL2-2 | GTQTYICNVNHKPSNTKVDKKVEPKSCDKTHTCPPCPAPELLGGPSVFLFPP | RTVAAPSVFIFPPSDEQLKSGT |
| | | + [Unknown anti- | KPKDTLMISRTPEVTCVVVDVSHEDPEVKFNWYVDGVEVHNAKTKPCEEQ | ASVVCLLNNFYPREAKVQWK |
| | | <huGIPR> 21-143_4B1 | YGSTYRCVSVLTVLHQDWLNGKEYKCKVSNKALPAPIEKTISKAKGQPRE | VDNALQSGNSQESVTEQDSK |
| | | VK1 (1-236) | PQVYTLPPSREEMTKNQVSLTCLVKGFYPSDIAVEWESNGQPENNYKTTPP | DSTYSLSSTLTLSKADYEKHK |
| | | VL]:: huKLC-CL (mAb- | VLDSDGSFFLYSKLTVDKSRWQQGNVFSCSVMHEALHNHYTQKSLSLSPG | VYACEVTHQGLSSPVTKSFNR |
| | | fusion) | K (SEQ ID NO: 3415) | GEC (SEQ ID NO: 3706) |
| PL- | iPS: | huGLP-1(A2G, E3D, | HGDGTFTSDVSSYLEGQAAKEFIAWLVKGGGGSGSATGGSGSVASSGSGS | DIQMTQSPSSLSASIGDRVTIT |
| 45570 | 422065 | R30G):: 1KmodT482V, | ATHLQVQLVESGGGVVQPGRSLRLSCAASGFTFSYFGMHWVRQAPGKGL | CRASQDIRDYLGWYQQKPGK |
| | | M493L):: [hu | EWVAVIWYDGSNKYYADSVKGRFTISRDNSKNTLYLQMNSLRAEDTAVY | APKRLIYGASSLQSGVPSRFSG |
| | | anti-<huGIPR> 21- | YCARDGTIFGVLLGDYWGQGTLVTVSSASTKGPSVFPLAPSSKSTSGGTAA | SGSGTEFTLTISSLQPEDFATY |
| | | 143_6H1 | LGCLVKDYFPEPVTVSWNSGALTSGVHTFPAVLQSSGLYSLSSVVTVPSSSL | YCLQHNNYPFTFGPGTKVDIK |
| | | VH]:: huIgG1zSEFL2-2 | GTQTYICNVNHKPSNTKVDKKVEPKSCDKTHTCPPCPAPELLGGPSVFLFPP | RTVAAPSVFIFPPSDEQLKSGT |
| | | + [Unknown anti- | KPKDTLMISRTPEVTCVVVDVSHEDPEVKFNWYVDGVEVHNAKTKPCEEQ | ASVVCLLNNFYPREAKVQWK |
| | | <huGIPR> 21-143_4B1 | YGSTYRCVSVLTVLHQDWLNGKEYKCKVSNKALPAPIEKTISKAKGQPRE | VDNALQSGNSQESVTEQDSK |
| | | VK1 (1-236) | PQVYTLPPSREEMTKNQVSLTCLVKGFYPSDIAVEWESNGQPENNYKTTPP | DSTYSLSSTLTLSKADYEKHK |
| | | VL]:: huKLC-CL (mAb- | VLDSDGSFFLYSKLTVDKSRWQQGNVFSCSVMHEALHNHYTQKSLSLSPG | VYACEVTHQGLSSPVTKSFNR |
| | | fusion) | K (SEQ ID NO: 3416) | GEC (SEQ ID NO: 3707) |
| PL- | iPS: | huGLP-1(A2S, E3D, | HSDGTFTSDVSSYLEGQAAKEFIAWLVKGGGGSGSATGGSGSVASSGSGSA | DIQMTQSPSSLSASIGDRVTIT |
| 45571 | 422081 | R30G):: 1KmodT482V, | THLQVQLVESGGGVVQPGRSLRLSCAASGFTFSYFGMHWVRQAPGKGLE | CRASQDIRDYLGWYQQKPGK |
| | | M493L):: [hu | WVAVIWYDGSNKYYADSVKGRFTISRDNSKNTLYLQMNSLRAEDTAVYY | APKRLIYGASSLQSGVPSRFSG |
| | | anti-<huGIPR> 21- | CARDGTIFGVLLGDYWGQGTLVTVSSASTKGPSVFPLAPSSKSTSGGTAAL | SGSGTEFTLTISSLQPEDFATY |
| | | 143_6H1 | GCLVKDYFPEPVTVSWNSGALTSGVHTFPAVLQSSGLYSLSSVVTVPSSSL | YCLQHNNYPFTFGPGTKVDIK |
| | | VH]:: huIgG1zSEFL2-2 | GTQTYICNVNHKPSNTKVDKKVEPKSCDKTHTCPPCPAPELLGGPSVFLFPP | RTVAAPSVFIFPPSDEQLKSGT |
| | | + [Unknown anti- | KPKDTLMISRTPEVTCVVVDVSHEDPEVKFNWYVDGVEVHNAKTKPCEEQ | ASVVCLLNNFYPREAKVQWK |
| | | <huGIPR> 21-143_4B1 | YGSTYRCVSVLTVLHQDWLNGKEYKCKVSNKALPAPIEKTISKAKGQPRE | VDNALQSGNSQESVTEQDSK |
| | | VK1 (1-236) | PQVYTLPPSREEMTKNQVSLTCLVKGFYPSDIAVEWESNGQPENNYKTTPP | DSTYSLSSTLTLSKADYEKHK |
| | | VL]:: huKLC-CL (mAb- | VLDSDGSFFLYSKLTVDKSRWQQGNVFSCSVMHEALHNHYTQKSLSLSPG | VYACEVTHQGLSSPVTKSFNR |
| | | fusion) | K (SEQ ID NO: 3417) | GEC (SEQ ID NO: 3708) |
| PL- | iPS: | huGLP-1(0A, A2G, | AHGEGTFTSDVSSYLEGQAAKEFIAWLVKGGGGSGSATGGSGSVASSGSG | DIQMTQSPSSLSASIGDRVTIT |
| 45572 | 422084 | R30G):: 1KmodT482V, | SATHLQVQLVESGGGVVQPGRSLRLSCAASGFTFSYFGMHWVRQAPGKGL | CRASQDIRDYLGWYQQKPGK |
| | | M493L):: [hu | EWVAVIWYDGSNKYYADSVKGRFTISRDNSKNTLYLQMNSLRAEDTAVY | APKRLIYGASSLQSGVPSRFSG |
| | | anti-<huGIPR> 21- | YCARDGTIFGVLLGDYWGQGTLVTVSSASTKGPSVFPLAPSSKSTSGGTAA | SGSGTEFTLTISSLQPEDFATY |
| | | 143_6H1 | LGCLVKDYFPEPVTVSWNSGALTSGVHTFPAVLQSSGLYSLSSVVTVPSSSL | YCLQHNNYPFTFGPGTKVDIK |
| | | VH]:: huIgG1zSEFL2-2 | GTQTYICNVNHKPSNTKVDKKVEPKSCDKTHTCPPCPAPELLGGPSVFLFPP | RTVAAPSVFIFPPSDEQLKSGT |
| | | + [Unknown anti- | KPKDTLMISRTPEVTCVVVDVSHEDPEVKFNWYVDGVEVHNAKTKPCEEQ | ASVVCLLNNFYPREAKVQWK |
| | | <huGIPR> 21-143_4B1 | YGSTYRCVSVLTVLHQDWLNGKEYKCKVSNKALPAPIEKTISKAKGQPRE | VDNALQSGNSQESVTEQDSK |
| | | VK1 (1-236) | PQVYTLPPSREEMTKNQVSLTCLVKGFYPSDIAVEWESNGQPENNYKTTPP | DSTYSLSSTLTLSKADYEKHK |
| | | VL]:: huKLC-CL (mAb- | VLDSDGSFFLYSKLTVDKSRWQQGNVFSCSVMHEALHNHYTQKSLSLSPG | VYACEVTHQGLSSPVTKSFNR |
| | | fusion) | K (SEQ ID NO: 3418) | GEC (SEQ ID NO: 3709) |
| PL- | iPS: | [hu anti-<huGLP-1R> | QVQLVESGGGVVQPGRSLRLSCAASGFTLSSYGMHWVRQAPGKGLEWVA | HGEGTFTSDLSKQMEEEAVR |
| 47264 | 422961 | 3E6.1 VH]:: huIgG1z- | VIWYDGSNKYYADSVKGRFTISRDNSKNTLYLQMNSLRAEDTAVYYCAR | LFAAQAAQQGGGGSGSATGG |
| | | SEFL2-KDD + gila | GGGSGSYRYYYYGLDVWGQGTTVTVSSASTKGPSVFPLAPSSKSTSGGTA | SGSVASSGSGSATGSAIQMTQ |
| | | monsterExendin-4(1- | ALGCLVKDYFPEPVTVSWNSGALTSGVHTFPAVLQSSGLYSLKSVVTVPSS | SPSSVSASIGDRVTITCRASQN |
| | | 22):: 1AQ1K(modV, GS) | SLGTQTYICNVNHKPSNTKVDKKVEPKSCDKTHTCPPCPAPELLGGPSVFLF | INNLLAWYQQKPGKAPKLLIY |
| | | :: [hu anti-<huGLP-1R> | PPKPKDTLMISRTPEVTCVVVDVSHEDPEVKFNWYVDGVEVHNAKTKPCE | TASSLQSEVPSRFSGSGSGTDF |
| | | 3E6 VL]:: huKLC-S176E | EQYGSTYRCVSVLTVLHQDWLNGKEYKCKVSNKALPAPIEKTISKAKGQP | TLTISSLQPEDFAIYCCQQAHR |
| | | + [anti-<huGIPR> | REPQVYTLPPSREEMTKNQVSLTCLVKGFYPSDIAVEWESNGQPENNYDTT | FPPTFGQGTKVEIRRTVAAPS |
| | | 5G12.005 | PPVLDSDGSFFLYSDLTVDKSRWQQGNVFSCSVMHEALHNHYTQKSLSLS | VFIFPPSDEQLKSGTASVVCLL |
| | | VH]:: huIgG1z-SEFL2- | PGK (SEQ ID NO: 3419) | NNFYPREAKVQWKVDNALQ |
| | | EKK + [hu anti- | | SGNSQESVTEQDSKDSTYSLE |
| | | <huGIPR> 21- | | STLTLSKADYEKHKVYACEV |
| | | 143_5G12.006 VK1 | | THQGLSSPVTKSFNRGEC |
| | | (C137(118)I) | | (SEQ ID NO: 3710) |
| | | VL]:: huKLC-S176K | | |
| | | (Hetero-Ig) | | |
| PL- | iPS: | [hu anti-<huGLP-1R> | QVQLVESGGGVVQPGRSLRLSCAASGFTLSSYGMHWVRKAPGKGLEWVA | HGEGTFTSDLSKQMEEEAVR |
| 47265 | 422962 | 3E6.1 (Q46(39)K) | VIWYDGSNKYYADSVKGRFTISRDNSKNTLYLQMNSLRAEDTAVYYCAR | LFAAQAAQQGGGGSGSATGG |
| | | VH]:: huIgG1z-SEFL2- | GGGSGSYRYYYYGLDVWGQGTTVTVSSASTKGPSVFPLAPSSKSTSGGTA | SGSVASSGSGSATGSAIQMTQ |
| | | KDD + gila | ALGCLVKDYFPEPVTVSWNSGALTSGVHTFPAVLQSSGLYSLKSVVTVPSS | SPSSVSASIGDRVTITCRASQN |
| | | monsterExendin-4 | SLGTQTYICNVNHKPSNTKVDKKVEPKSCDKTHTCPPCPAPELLGGPSVFLF | INNLLAWYQEKPGKAPKLLIY |
| | | (1-22):: 1AQ1K(modV, | PPKPKDTLMISRTPEVTCVVVDVSHEDPEVKFNWYVDGVEVHNAKTKPCE | TASSLQSEVPSRFSGSGSGTDF |
| | | GS):: [hu anti- | EQYGSTYRCVSVLTVLHQDWLNGKEYKCKVSNKALPAPIEKTISKAKGQP | TLTISSLQPEDFAIYCCQQAHR |
| | | <huGLP-1R> 3E6 | REPQVYTLPPSREEMTKNQVSLTCLVKGFYPSDIAVEWESNGQPENNYDTT | FPPTFGQGTKVEIRRTVAAPS |
| | | (Q46(112)E) | PPVLDSDGSFFLYSDLTVDKSRWQQGNVFSCSVMHEALHNHYTQKSLSLS | VFIFPPSDEQLKSGTASVVCLL |
| | | VL]:: huKLC-S176E + | PGK (SEQ ID NO: 3420) | NNFYPREAKVQWKVDNALQ |
| | | [anti-<huGIPR> | | SGNSQESVTEQDSKDSTYSLE |
| | | 5G12.005 (Q46E) | | STLTLSKADYEKHKVYACEV |
| | | VH]:: huIgG1z-SEFL2- | | THQGLSSPVTKSFNRGEC |
| | | EKK + [hu anti- | | (SEQ ID NO: 3711) |
| | | <huGIPR> 21- | | |
| | | 143_5G12.006 VK1 (Q46 | | |
| | | (38)K, C137(118)I) | | |
| | | VL]:: huKLC-S176K | | |
| | | (Hetero-Ig) | | |
| PL- | iPS: | [hu anti-<huGLP-1R> | QVQLVESGGGVVQPGRSLRLSCAASGFTLSSYGMHWVRQAPGKKLEWVA | HGEGTFTSDLSKQMEEEAVR |
| 47266 | 422963 | 3E6.1 (G51(44)K) | VIWYDGSNKYYADSVKGRFTISRDNSKNTLYLQMNSLRAEDTAVYYCAR | LFAAQAAQQGGGGSGSATGG |
| | | VH]:: huIgG1z-SEFL2- | GGGSGSYRYYYYGLDVWGQGTTVTVSSASTKGPSVFPLAPSSKSTSGGTA | SGSVASSGSGSATGSAIQMTQ |
| | | KDD + gila | ALGCLVKDYFPEPVTVSWNSGALTSGVHTFPAVLQSSGLYSLKSVVTVPSS | SPSSVSASIGDRVTITCRASQN |
| | | monsterExendin-4 | SLGTQTYICNVNHKPSNTKVDKKVEPKSCDKTHTCPPCPAPELLGGPSVFLF | INNLLAWYQQKPGKAPKLLIY |
| | | (1-22):: 1AQ1K(modV, | PPKPKDTLMISRTPEVTCVVVDVSHEDPEVKFNWYVDGVEVHNAKTKPCE | TASSLQSEVPSRFSGSGSGTDF |
| | | GS):: [hu anti- | EQYGSTYRCVSVLTVLHQDWLNGKEYKCKVSNKALPAPIEKTISKAKGQP | TLTISSLQPEDFAIYCCQQAHR |
| | | <huGLP-1R>3E6 | REPQVYTLPPSREEMTKNQVSLTCLVKGFYPSDIAVEWESNGQPENNYDTT | FPPTFGEGTKVEIRRTVAAPSV |
| | | (Q141(174)E) | PPVLDSDGSFFLYSDLTVDKSRWQQGNVFSCSVMHEALHNHYTQKSLSLS | FIFPPSDEQLKSGTASVVCLLN |
| | | VL]:: huKLC-S176E + | PGK (SEQ ID NO: 3421) | NFYPREAKVQWKVDNALQS |
| | | [anti-<huGIPR> | | GNSQESVTEQDSKDSTYSLES |
| | | 5G12.005 (Q51G) | | TLTLSKADYEKHKVYACEVT |
| | | VH]:: huIgG1z-SEFL2- | | HQGLSSPVTKSFNRGEC (SEQ |
| | | EKK + [hu anti- | | ID NO: 3712) |
| | | <huGIPR> 21- | | |
| | | 143_5G12.006 VK1 | | |
| | | (Q141(100)K, | | |
| | | C137(118)I) | | |
| | | VL]:: huKLC-S176K | | |
| | | (Hetero-Ig) | | |
| PL- | iPS: | [hu anti-<huGLP-1R> | QVQLVESGGGVVQPGRSLRLSCAASGFTLSSYGMHWVRQAPGKGLEWVA | HGEGTFTSDLSKQMEEEAVR |
| 47267 | 422964 | 3E6.1 VH]:: huIgG1z- | VIWYDGSNKYYADSVKGRFTISRDNSKNTLYLQMNSLRAEDTAVYYCAR | LFAAQAAQQGGGGSGSATGG |
| | | SEFL2-KDD + gila | GGGSGSYRYYYYGLDVWGQGTTVTVSSASTKGPSVFPLAPSSKSTSGGTA | SGSVASSGSGSATGSAIQMTQ |
| | | monsterExendin-4 | ALGCLVKDYFPEPVTVSWNSGALTSGVHTFPAVLQSSGLYSLKSVVTVPSS | SPSSVSASIGDRVTITCRASQN |
| | | (1-22):: 1AQ1K(modV, | SLGTQTYICNVNHKPSNTKVDKKVEPKSCDKTHTCPPCPAPELLGGPSVFLF | INNLLAWYQQKPGKAPKLLIY |
| | | GS):: [hu anti- | PPKPKDTLMISRTPEVTCVVVDVSHEDPEVKFNWYVDGVEVHNAKTKPCE | TASSLQSEVPSRFSGSGSGTDF |
| | | <huGLP-1R>3E6 (C105Y) | EQYGSTYRCVSVLTVLHQDWLNGKEYKCKVSNKALPAPIEKTISKAKGQP | TLTISSLQPEDFAIYYCQQAHR |
| | | VL]:: huKLC-S176E + | REPQVYTLPPSREEMTKNQVSLTCLVKGFYPSDIAVEWESNGQPENNYDTT | FPPTFGQGTKVEIRRTVAAPS |
| | | [anti-<huGIPR> | PPVLDSDGSFFLYSDLTVDKSRWQQGNVFSCSVMHEALHNHYTQKSLSLS | VFIFPPSDEQLKSGTASVVCLL |
| | | 5G12.005 | PGK (SEQ ID NO: 3422) | NNFYPREAKVQWKVDNALQ |
| | | VH]:: huIgG1z-SEFL2- | | SGNSQESVTEQDSKDSTYSLE |
| | | EKK + [hu anti- | | STLTLSKADYEKHKVYACEV |
| | | <huGIPR> 21- | | THQGLSSPVTKSFNRGEC |
| | | 143_5G12.006 VK1 | | (SEQ ID NO: 3713) |
| | | (C137(118)I) | | |
| | | VL]:: huKLC-S176K | | |
| | | (Hetero-Ig) | | |
| PL- | iPS: | [hu anti-<huGLP-1R> | QVQLVESGGGVVQPGRSLRLSCAASGFTLSSYGMHWVRKAPGKGLEWVA | HGEGTFTSDLSKQMEEEAVR |
| 47268 | 422965 | 3E6.1 (Q46(39)K) | VIWYDGSNKYYADSVKGRFTISRDNSKNTLYLQMNSLRAEDTAVYYCAR | LFAAQAAQQGGGGSGSATGG |
| | | VH]:: huIgG1z-SEFL2- | GGGSGSYRYYYYGLDVWGQGTTVTVSSASTKGPSVFPLAPSSKSTSGGTA | SGSVASSGSGSATGSAIQMTQ |
| | | KDD + gila | ALGCLVKDYFPEPVTVSWNSGALTSGVHTFPAVLQSSGLYSLKSVVTVPSS | SPSSVSASIGDRVTITCRASQN |
| | | monsterExendin-4 | SLGTQTYICNVNHKPSNTKVDKKVEPKSCDKTHTCPPCPAPELLGGPSVFLF | INNLLAWYQEKPGKAPKLLIY |
| | | (1-22):: 1AQ1K(modV, | PPKPKDTLMISRTPEVTCVVVDVSHEDPEVKFNWYVDGVEVHNAKTKPCE | TASSLQSEVPSRFSGSGSGTDF |
| | | GS):: [hu anti- | EQYGSTYRCVSVLTVLHQDWLNGKEYKCKVSNKALPAPIEKTISKAKGQP | TLTISSLQPEDFAIYYCQQAHR |
| | | <huGLP-1R>3E6 | REPQVYTLPPSREEMTKNQVSLTCLVKGFYPSDIAVEWESNGQPENNYDTT | FPPTFGQGTKVEIRRTVAAPS |
| | | (Q46(112)E, | PPVLDSDGSFFLYSDLTVDKSRWQQGNVFSCSVMHEALHNHYTQKSLSLS | VFIFPPSDEQLKSGTASVVCLL |
| | | C105Y) VL]:huKLC- | PGK (SEQ ID NO: 3423) | NNFYPREAKVQWKVDNALQ |
| | | S176E + [anti- | | SGNSQESVTEQDSKDSTYSLE |
| | | <huGIPR> 5G12.005 | | STLTLSKADYEKHKVYACEV |
| | | (Q46E) VH]:: huIgG1z- | | THQGLSSPVTKSFNRGEC |
| | | SEFL2-EKK + [hu anti- | | (SEQ ID NO: 3714) |
| | | <huGIPR> 21- | | |
| | | 143_5G12.006 VK1 | | |
| | | (Q46(38)K,C137(118)I) | | |
| | | VL]:: huKLC-S176K | | |
| | | (Hetero-Ig) | | |
| PL- | iPS: | [hu anti-<huGLP-1R> | QVQLVESGGGVVQPGRSLRLSCAASGFTLSSYGMHWVRQAPGKKLEWVA | HGEGTFTSDLSKQMEEEAVR |
| 47269 | 422966 | 3E6.1 (G51(44)K) | VIWYDGSNKYYADSVKGRFTISRDNSKNTLYLQMNSLRAEDTAVYYCAR | LFAAQAAQQGGGGSGSATGG |
| | | VH]:: huIgG1z-SEFL2- | GGGSGSYRYYYYGLDVWGQGTTVTVSSASTKGPSVFPLAPSSKSTSGGTA | SGSVASSGSGSATGSAIQMTQ |
| | | KDD + gila | ALGCLVKDYFPEPVTVSWNSGALTSGVHTFPAVLQSSGLYSLKSVVTVPSS | SPSSVSASIGDRVTITCRASQN |
| | | monsterExendin-4 | SLGTQTYICNVNHKPSNTKVDKKVEPKSCDKTHTCPPCPAPELLGGPSVFLF | INNLLAWYQQKPGKAPKLLIY |
| | | (1-22):: | PPKPKDTLMISRTPEVTCVVVDVSHEDPEVKFNWYVDGVEVHNAKTKPCE | TASSLQSEVPSRFSGSGSGTDF |
| | | 1AQ1K(modV,GS):: | EQYGSTYRCVSVLTVLHQDWLNGKEYKCKVSNKALPAPIEKTISKAKGQP | TLTISSLQPEDFAIYYCQQAHR |
| | | [hu anti-<huGLP-1R> | REPQVYTLPPSREEMTKNQVSLTCLVKGFYPSDIAVEWESNGQPENNYDTT | FPPTFGEGTKVEIRRTVAAPSV |
| | | 3E6 (C105Y, | PPVLDSDGSFFLYSDLTVDKSRWQQGNVFSCSVMHEALHNHYTQKSLSLS | FIFPPSDEQLKSGTASVVCLLN |
| | | Q141(174)E) | PGK (SEQ ID NO: 3424) | NFYPREAKVQWKVDNALQS |
| | | VL]:: huKLC-S176E + | | GNSQESVTEQDSKDSTYSLES |
| | | [anti-<huGIPR> | | TLTLSKADYEKHKVYACEVT |
| | | 5G12.005 (Q51G) | | HQGLSSPVTKSFNRGEC (SEQ |
| | | VH]:: huIgG1z-SEFL2- | | ID NO: 3715) |
| | | EKK + [hu anti- | | |
| | | <huGIPR> 21- | | |
| | | 143_5G12.006 VK1 | | |
| | | (Q141(100)K, | | |
| | | C137(118)I) | | |
| | | VL]:: huKLC-S176K | | |
| | | (Hetero-Ig) | | |
| PL- | iPS: | [hu anti-<huGLP-1R> | QVQLVESGGGVVQPGRSLRLSCAASGFTLSSYGMHWVRQAPGKGLEWVA | HGEGTFTSDLSKQMEEEAVR |
| 47270 | 422967 | 3E6.1 VH]:: huIgG1z- | VIWYDGSNKYYADSVKGRFTISRDNSKNTLYLQMNSLRAEDTAVYYCAR | LFAAQAAQQGGGGSGSATGG |
| | | SEFL2-KDD + gila | GGGSGSYRYYYYGLDVWGQGTTVTVSSASTKGPSVFPLAPSSKSTSGGTA | SGSVASSGSGSATGSAIQMTQ |
| | | monsterExendin-4(1- | ALGCLVKDYFPEPVTVSWNSGALTSGVHTFPAVLQSSGLYSLKSVVTVPSS | SPSSVSASIGDRVTITCRASQN |
| | | 22):: 1AQ1K(modV,GS) | SLGTQTYICNVNHKPSNTKVDKKVEPKSCDKTHTCPPCPAPELLGGPSVFLF | INNLLAWYQQKPGKAPKLLIY |
| | | ::[hu anti-<huGLP- | PPKPKDTLMISRTPEVTCVVVDVSHEDPEVKFNWYVDGVEVHNAKTKPCE | TASSLQSEVPSRFSGSGSGTDF |
| | | 1R> 3E6 (C105S) | EQYGSTYRCVSVLTVLHQDWLNGKEYKCKVSNKALPAPIEKTISKAKGQP | TLTISSLQPEDFAIYSCQQAHR |
| | | VL]:: huKLC-S176E + | REPQVYTLPPSREEMTKNQVSLTCLVKGFYPSDIAVEWESNGQPENNYDTT | FPPTFGQGTKVEIRRTVAAPS |
| | | [anti-<huGIPR> | PPVLDSDGSFFLYSDLTVDKSRWQQGNVFSCSVMHEALHNHYTQKSLSLS | VFIFPPSDEQLKSGTASVVCLL |
| | | 5G12.005 | PGK (SEQ ID NO: 3425) | NNFYPREAKVQWKVDNALQ |
| | | VH]:: huIgG1z-SEFL2- | | SGNSQESVTEQDSKDSTYSLE |
| | | EKK + [hu anti- | | STLTLSKADYEKHKVYACEV |
| | | <huGIPR> 21- | | THQGLSSPVTKSFNRGEC |
| | | 143_5G12.006 VK1 | | (SEQ ID NO: 3716) |
| | | (C137(118)I) | | |
| | | VL]:: huKLC-S176K | | |
| | | (Hetero-Ig) | | |
| PL- | iPS: | [hu anti-<huGLP-1R> | QVQLVESGGGVVQPGRSLRLSCAASGFTLSSYGMHWVRKAPGKGLEWVA | HGEGTFTSDLSKQMEEEAVR |
| 47271 | 422968 | 3E6.1 (Q46(39)K) | VIWYDGSNKYYADSVKGRFTISRDNSKNTLYLQMNSLRAEDTAVYYCAR | LFAAQAAQQGGGGSGSATGG |
| | | VH]:: huIgG1z-SEFL2- | GGGSGSYRYYYYGLDVWGQGTTVTVSSASTKGPSVFPLAPSSKSTSGGTA | SGSVASSGSGSATGSAIQMTQ |
| | | KDD + gila | ALGCLVKDYFPEPVTVSWNSGALTSGVHTFPAVLQSSGLYSLKSVVTVPSS | SPSSVSASIGDRVTITCRASQN |
| | | monsterExendin-4 | SLGTQTYICNVNHKPSNTKVDKKVEPKSCDKTHTCPPCPAPELLGGPSVFLF | INNLLAWYQEKPGKAPKLLIY |
| | | (1-22):: | PPKPKDTLMISRTPEVTCVVVDVSHEDPEVKFNWYVDGVEVHNAKTKPCE | TASSLQSEVPSRFSGSGSGTDF |
| | | 1AQ1K(modV,GS):: | EQYGSTYRCVSVLTVLHQDWLNGKEYKCKVSNKALPAPIEKTISKAKGQP | TLTISSLQPEDFAIYSCQQAHR |
| | | [hu anti-<huGLP-1R> | REPQVYTLPPSREEMTKNQVSLTCLVKGFYPSDIAVEWESNGQPENNYDTT | FPPTFGQGTKVEIRRTVAAPS |
| | | 3E6 (Q46(112)E, | PPVLDSDGSFFLYSDLTVDKSRWQQGNVFSCSVMHEALHNHYTQKSLSLS | VFIFPPSDEQLKSGTASVVCLL |
| | | C105S) VL]:: huKLC- | PGK (SEQ ID NO: 3426) | NNFYPREAKVQWKVDNALQ |
| | | S176E + [anti- | | SGNSQESVTEQDSKDSTYSLE |
| | | <huGIPR> 5G12.005 | | STLTLSKADYEKHKVYACEV |
| | | (Q46E) VH]:: huIgG1z- | | THQGLSSPVTKSFNRGEC |
| | | SEFL2-EKK + [hu anti- | | (SEQ ID NO: 3717) |
| | | <huGIPR> 21- | | |
| | | 143_5G12.006 VK1 | | |
| | | (Q46(38)K,C137(118)I) | | |
| | | VL]:: huKLC-S176K | | |
| | | (Hetero-Ig) | | |
| PL- | iPS: | [hu anti-<huGLP-1R> | QVQLVESGGGVVQPGRSLRLSCAASGFTLSSYGMHWVRQAPGKKLEWVA | HGEGTFTSDLSKQMEEEAVR |
| 47272 | 422969 | 3E6.1(G51(44)K) | VIWYDGSNKYYADSVKGRFTISRDNSKNTLYLQMNSLRAEDTAVYYCAR | LFAAQAAQQGGGGSGSATGG |
| | | VH]:: huIgG1z-SEFL2- | GGGSGSYRYYYYGLDVWGQGTTVTVSSASTKGPSVFPLAPSSKSTSGGTA | SGSVASSGSGSATGSAIQMTQ |
| | | KDD + gila | ALGCLVKDYFPEPVTVSWNSGALTSGVHTFPAVLQSSGLYSLKSVVTVPSS | SPSSVSASIGDRVTITCRASQN |
| | | monsterExendin-4 | SLGTQTYICNVNHKPSNTKVDKKVEPKSCDKTHTCPPCPAPELLGGPSVFLF | INNLLAWYQQKPGKAPKLLIY |
| | | (1-22):: | PPKPKDTLMISRTPEVTCVVVDVSHEDPEVKFNWYVDGVEVHNAKTKPCE | TASSLQSEVPSRFSGSGSGTDF |
| | | 1AQ1K(modV,GS):: | EQYGSTYRCVSVLTVLHQDWLNGKEYKCKVSNKALPAPIEKTISKAKGQP | TLTISSLQPEDFAIYSCQQAHR |
| | | [hu anti-<huGLP-1R> | REPQVYTLPPSREEMTKNQVSLTCLVKGFYPSDIAVEWESNGQPENNYDTT | FPPTFGEGTKVEIRRTVAAPSV |
| | | 3E6 (C105S, | PPVLDSDGSFFLYSDLTVDKSRWQQGNVFSCSVMHEALHNHYTQKSLSLS | FIFPPSDEQLKSGTASVVCLLN |
| | | Q141(174)E) | PGK (SEQ ID NO: 3427) | NFYPREAKVQWKVDNALQS |
| | | VL]:: huKLC-S176E + | | GNSQESVTEQDSKDSTYSLES |
| | | [anti-<huGIPR> | | TLTLSKADYEKHKVYACEVT |
| | | 5G12.005 (Q51G) | | HQGLSSPVTKSFNRGEC (SEQ |
| | | VH]:: huIgG1z-SEFL2- | | ID NO: 3718) |
| | | EKK + [hu anti- | | |
| | | <huGIPR> 21- | | |
| | | 143_5G12.006 VK1 | | |
| | | (Q141(100)K, | | |
| | | C137(118)I) | | |
| | | VL]:: huKLC-S176K | | |
| | | (Hetero-Ig) | | |
| PL- | iPS: | [hu anti-<huGLP-1R> | QVQLVESGGGVVQPGRSLRLSCAASGFTLSSYGMHWVRQAPGKGLEWVA | HGEGTFTSDLSKQMEEEAVR |
| 47273 | 422970 | 3E6.1 VH]:: huIgG1z- | VIWYDGSNKYYADSVKGRFTISRDNSKNTLYLQMNSLRAEDTAVYYCAR | LFAAQAAQQGGGGSGSATGG |
| | | SEFL2-KDD + gila | GGGSGSYRYYYYGLDVWGQGTTVTVSSASTKGPSVFPLAPSSKSTSGGTA | SGSVASSGSGSATGSAIQMTQ |
| | | monsterExendin-4 | ALGCLVKDYFPEPVTVSWNSGALTSGVHTFPAVLQSSGLYSLKSVVTVPSS | SPSSVSASIGDRVTITCRASQN |
| | | (1-22):: | SLGTQTYICNVNHKPSNTKVDKKVEPKSCDKTHTCPPCPAPELLGGPSVFLF | INNLLAWYQQKPGKAPKLLIY |
| | | 1AQ1K(modV,GS):: | PPKPKDTLMISRTPEVTCVVVDVSHEDPEVKFNWYVDGVEVHNAKTKPCE | TASSLQSEVPSRFSGSGSGTDF |
| | | [hu anti-<huGLP-1R> | EQYGSTYRCVSVLTVLHQDWLNGKEYKCKVSNKALPAPIEKTISKAKGQP | TLTISSLQPEDFAIYCCQQAHR |
| | | 3E6 VL]:: huKLC-S176E | REPQVYTLPPSREEMTKNQVSLTCLVKGFYPSDIAVEWESNGQPENNYDTT | FPPTFGQGTKVEIRRTVAAPS |
| | | + [anti-<huGIPR> 21- | PPVLDSDGSFFLYSDLTVDKSRWQQGNVFSCSVMHEALHNHYTQKSLSLS | VFIFPPSDEQLKSGTASVVCLL |
| | | 143_6H1 VH3 | PGK (SEQ ID NO: 3428) | NNFYPREAKVQWKVDNALQ |
| | | VH]:: huIgG1z-SEFL2- | | SGNSQESVTEQDSKDSTYSLE |
| | | EKK + [hu anti- | | STLTLSKADYEKHKVYACEV |
| | | <huGIPR> 21-143_6H1 | | THQGLSSPVTKSFNRGEC |
| | | VK1 VL]:: huKLC- | | (SEQ ID NO: 3719) |
| | | S176K (Hetero-Ig) | | |
| PL- | iPS: | [hu anti-<huGLP-1R> | QVQLVESGGGVVQPGRSLRLSCAASGFTLSSYGMHWVRKAPGKGLEWVA | HGEGTFTSDLSKQMEEEAVR |
| 47274 | 422971 | 3E6.1 (Q46(39)K) | VIWYDGSNKYYADSVKGRFTISRDNSKNTLYLQMNSLRAEDTAVYYCAR | LFAAQAAQQGGGGSGSATGG |
| | | VH]:: huIgG1z-SEFL2- | GGGSGSYRYYYYGLDVWGQGTTVTVSSASTKGPSVFPLAPSSKSTSGGTA | SGSVASSGSGSATGSAIQMTQ |
| | | KDD + gila | ALGCLVKDYFPEPVTVSWNSGALTSGVHTFPAVLQSSGLYSLKSVVTVPSS | SPSSVSASIGDRVTITCRASQN |
| | | monsterExendin-4 | SLGTQTYICNVNHKPSNTKVDKKVEPKSCDKTHTCPPCPAPELLGGPSVFLF | INNLLAWYQEKPGKAPKLLIY |
| | | (1-22):: | PPKPKDTLMISRTPEVTCVVVDVSHEDPEVKFNWYVDGVEVHNAKTKPCE | TASSLQSEVPSRFSGSGSGTDF |
| | | 1AQ1K(modV,GS):: | EQYGSTYRCVSVLTVLHQDWLNGKEYKCKVSNKALPAPIEKTISKAKGQP | TLTISSLQPEDFAIYCCQQAHR |
| | | [hu anti-<huGLP-1R> | REPQVYTLPPSREEMTKNQVSLTCLVKGFYPSDIAVEWESNGQPENNYDTT | FPPTFGQGTKVEIRRTVAAPS |
| | | 3E6 (Q46(112)E) | PPVLDSDGSFFLYSDLTVDKSRWQQGNVFSCSVMHEALHNHYTQKSLSLS | VFIFPPSDEQLKSGTASVVCLL |
| | | VL]:: huKLC-S176E + | PGK (SEQ ID NO: 3429) | NNFYPREAKVQWKVDNALQ |
| | | [anti-<huGIPR> 21- | | SGNSQESVTEQDSKDSTYSLE |
| | | 143_6H1 VH3 (Q46E) | | STLTLSKADYEKHKVYACEV |
| | | VH]:: huIgG1z-SEFL2- | | THQGLSSPVTKSFNRGEC |
| | | EKK + [hu anti- | | (SEQ ID NO: 3720) |
| | | <huGIPR> 21-143_6H1 | | |
| | | VK1 (Q46(38)K) | | |
| | | VL]:: huKLC-S176K | | |
| | | (Hetero-Ig) | | |
| PL- | iPS: | [hu anti-<huGLP-1R> | QVQLVESGGGVVQPGRSLRLSCAASGFTLSSYGMHWVRQAPGKKLEWVA | HGEGTFTSDLSKQMEEEAVR |
| 47275 | 422972 | 3E6.1 (G51(44)K) | VIWYDGSNKYYADSVKGRFTISRDNSKNTLYLQMNSLRAEDTAVYYCAR | LFAAQAAQQGGGGSGSATGG |
| | | VH]:: huIgG1z-SEFL2- | GGGSGSYRYYYYGLDVWGQGTTVTVSSASTKGPSVFPLAPSSKSTSGGTA | SGSVASSGSGSATGSAIQMTQ |
| | | KDD + gila | ALGCLVKDYFPEPVTVSWNSGALTSGVHTFPAVLQSSGLYSLKSVVTVPSS | SPSSVSASIGDRVTITCRASQN |
| | | monsterExendin-4(1- | SLGTQTYICNVNHKPSNTKVDKKVEPKSCDKTHTCPPCPAPELLGGPSVFLF | INNLLAWYQQKPGKAPKLLIY |
| | | 22):: 1AQ1K(modV,GS): | PPKPKDTLMISRTPEVTCVVVDVSHEDPEVKFNWYVDGVEVHNAKTKPCE | TASSLQSEVPSRFSGSGSGTDF |
| | | :[hu anti-<huGLP-1R> | EQYGSTYRCVSVLTVLHQDWLNGKEYKCKVSNKALPAPIEKTISKAKGQP | TLTISSLQPEDFAIYCCQQAHR |
| | | 3E6 (Q141(174)E) | REPQVYTLPPSREEMTKNQVSLTCLVKGFYPSDIAVEWESNGQPENNYDTT | FPPTFGEGTKVEIRRTVAAPSV |
| | | VL]:: huKLC-S176E + | PPVLDSDGSFFLYSDLTVDKSRWQQGNVFSCSVMHEALHNHYTQKSLSLS | FIFPPSDEQLKSGTASVVCLLN |
| | | [anti-<huGIPR> 21- | PGK (SEQ ID NO: 3430) | NFYPREAKVQWKVDNALQS |
| | | 143_6H1 VH3 (G51E) | | GNSQESVTEQDSKDSTYSLES |
| | | VH]:: huIgG1z-SEFL2- | | TLTLSKADYEKHKVYACEVT |
| | | EKK + [hu anti- | | HQGLSSPVTKSFNRGEC (SEQ |
| | | <huGIPR> 21-143_6H1 | | ID NO: 3721) |
| | | VK1(P141(100)K) | | |
| | | VL]:: huKLC-S176K | | |
| | | (Hetero-Ig) | | |
| PL- | iPS: | [hu anti-<huGLP-1R> | QVQLVESGGGVVQPGRSLRLSCAASGFTLSSYGMHWVRQAPGKGLEWVA | HGEGTFTSDLSKQMEEEAVR |
| 47276 | 422973 | 3E6.1 VH]:: huIgG1z- | VIWYDGSNKYYADSVKGRFTISRDNSKNTLYLQMNSLRAEDTAVYYCAR | LFAAQAAQQGGGGSGSATGG |
| | | SEFL2-KDD + gila | GGGSGSYRYYYYGLDVWGQGTTVTVSSASTKGPSVFPLAPSSKSTSGGTA | SGSVASSGSGSATGSAIQMTQ |
| | | monsterExendin-4(1- | ALGCLVKDYFPEPVTVSWNSGALTSGVHTFPAVLQSSGLYSLKSVVTVPSS | SPSSVSASIGDRVTITCRASQN |
| | | 22):: 1AQ1K(modV,GS): | SLGTQTYICNVNHKPSNTKVDKKVEPKSCDKTHTCPPCPAPELLGGPSVFLF | INNLLAWYQQKPGKAPKLLIY |
| | | :[hu anti-<huGLP-1R> | PPKPKDTLMISRTPEVTCVVVDVSHEDPEVKFNWYVDGVEVHNAKTKPCE | TASSLQSEVPSRFSGSGSGTDF |
| | | 3E6 (C105Y) | EQYGSTYRCVSVLTVLHQDWLNGKEYKCKVSNKALPAPIEKTISKAKGQP | TLTISSLQPEDFAIYYCQQAHR |
| | | VL]:: huKLC-S176E + | REPQVYTLPPSREEMTKNQVSLTCLVKGFYPSDIAVEWESNGQPENNYDTT | FPPTFGQGTKVEIRRTVAAPS |
| | | [anti-<huGIPR> 21- | PPVLDSDGSFFLYSDLTVDKSRWQQGNVFSCSVMHEALHNHYTQKSLSLS | VFIFPPSDEQLKSGTASVVCLL |
| | | 143_6H1 VH3 | PGK (SEQ ID NO: 3431) | NNFYPREAKVQWKVDNALQ |
| | | VH]:: huIgG1z-SEFL2- | | SGNSQESVTEQDSKDSTYSLE |
| | | EKK + [hu anti- | | STLTLSKADYEKHKVYACEV |
| | | <huGIPR> 21-143_6H1 | | THQGLSSPVTKSFNRGEC |
| | | VK1 VL]:: huKLC- | | (SEQ ID NO: 3722) |
| | | S176K (Hetero-Ig) | | |
| PL- | iPS: | [hu anti-<huGLP-1R> | QVQLVESGGGVVQPGRSLRLSCAASGFTLSSYGMHWVRKAPGKGLEWVA | HGEGTFTSDLSKQMEEEAVR |
| 47277 | 422974 | 3E6.1 (Q46(39)K) | VIWYDGSNKYYADSVKGRFTISRDNSKNTLYLQMNSLRAEDTAVYYCAR | LFAAQAAQQGGGGSGSATGG |
| | | VH]:: huIgG1z-SEFL2- | GGGSGSYRYYYYGLDVWGQGTTVTVSSASTKGPSVFPLAPSSKSTSGGTA | SGSVASSGSGSATGSAIQMTQ |
| | | KDD + gila | ALGCLVKDYFPEPVTVSWNSGALTSGVHTFPAVLQSSGLYSLKSVVTVPSS | SPSSVSASIGDRVTITCRASQN |
| | | monsterExendin-4 | SLGTQTYICNVNHKPSNTKVDKKVEPKSCDKTHTCPPCPAPELLGGPSVFLF | INNLLAWYQEKPGKAPKLLIY |
| | | (1-22):: | PPKPKDTLMISRTPEVTCVVVDVSHEDPEVKFNWYVDGVEVHNAKTKPCE | TASSLQSEVPSRFSGSGSGTDF |
| | | 1AQ1K(modV,GS):: | EQYGSTYRCVSVLTVLHQDWLNGKEYKCKVSNKALPAPIEKTISKAKGQP | TLTISSLQPEDFAIYYCQQAHR |
| | | [hu anti-<huGLP-1R> | REPQVYTLPPSREEMTKNQVSLTCLVKGFYPSDIAVEWESNGQPENNYDTT | FPPTFGQGTKVEIRRTVAAPS |
| | | 3E6 (Q46(112)E, | PPVLDSDGSFFLYSDLTVDKSRWQQGNVFSCSVMHEALHNHYTQKSLSLS | VFIFPPSDEQLKSGTASVVCLL |
| | | C105Y) VL]:: huKLC- | PGK (SEQ ID NO: 3432) | NNFYPREAKVQWKVDNALQ |
| | | S176E + [anti- | | SGNSQESVTEQDSKDSTYSLE |
| | | <huGIPR> 21-143_6H1 | | STLTLSKADYEKHKVYACEV |
| | | VH3 (Q46E) | | THQGLSSPVTKSFNRGEC |
| | | VH]:: huIgG1z-SEFL2- | | (SEQ ID NO: 3723) |
| | | EKK + [hu anti- | | |
| | | <huGIPR> 21-143_6H1 | | |
| | | VK1 (Q46(38)K) | | |
| | | VL]:: huKLC-S176K | | |
| | | (Hetero-Ig) | | |
| PL- | iPS: | [hu anti-<huGLP-1R> | QVQLVESGGGVVQPGRSLRLSCAASGFTLSSYGMHWVRQAPGKKLEWVA | HGEGTFTSDLSKQMEEEAVR |
| 47278 | 422975 | 3E6.1 (G51(44)K) | VIWYDGSNKYYADSVKGRFTISRDNSKNTLYLQMNSLRAEDTAVYYCAR | LFAAQAAQQGGGGSGSATGG |
| | | VH]:: huIgG1z-SEFL2- | GGGSGSYRYYYYGLDVWGQGTTVTVSSASTKGPSVFPLAPSSKSTSGGTA | SGSVASSGSGSATGSAIQMTQ |
| | | KDD + gila | ALGCLVKDYFPEPVTVSWNSGALTSGVHTFPAVLQSSGLYSLKSVVTVPSS | SPSSVSASIGDRVTITCRASQN |
| | | monsterExendin-4 | SLGTQTYICNVNHKPSNTKVDKKVEPKSCDKTHTCPPCPAPELLGGPSVFLF | INNLLAWYQQKPGKAPKLLIY |
| | | (1-22):: | PPKPKDTLMISRTPEVTCVVVDVSHEDPEVKFNWYVDGVEVHNAKTKPCE | TASSLQSEVPSRFSGSGSGTDF |
| | | 1AQ1K(modV,GS):: | EQYGSTYRCVSVLTVLHQDWLNGKEYKCKVSNKALPAPIEKTISKAKGQP | TLTISSLQPEDFAIYYCQQAHR |
| | | [hu anti-<huGLP-1R> | REPQVYTLPPSREEMTKNQVSLTCLVKGFYPSDIAVEWESNGQPENNYDTT | FPPTFGEGTKVEIRRTVAAPSV |
| | | 3E6 (C105Y, | PPVLDSDGSFFLYSDLTVDKSRWQQGNVFSCSVMHEALHNHYTQKSLSLS | FIFPPSDEQLKSGTASVVCLLN |
| | | Q141(174)E) | PGK (SEQ ID NO: 3433) | NFYPREAKVQWKVDNALQS |
| | | VL]:: huKLC-S176E + | | GNSQESVTEQDSKDSTYSLES |
| | | [anti-<huGIPR> 21- | | TLTLSKADYEKHKVYACEVT |
| | | 143_6H1 VH3 (G51E) | | HQGLSSPVTKSFNRGEC (SEQ |
| | | VH]:: huIgG1z-SEFL2- | | ID NO: 3724) |
| | | EKK + [hu anti- | | |
| | | <huGIPR> 21-143_6H1 | | |
| | | VK1(P141(100)K) | | |
| | | VL]:: huKLC-S176K | | |
| | | (Hetero-Ig) | | |
| PL- | iPS: | [hu anti-<huGLP-1R> | QVQLVESGGGVVQPGRSLRLSCAASGFTLSSYGMHWVRQAPGKGLEWVA | HGEGTFTSDLSKQMEEEAVR |
| 47279 | 422976 | 3E6.1 VH]:: huIgG1z- | VIWYDGSNKYYADSVKGRFTISRDNSKNTLYLQMNSLRAEDTAVYYCAR | LFAAQAAQQGGGGSGSATGG |
| | | SEFL2-KDD + gila | GGGSGSYRYYYYGLDVWGQGTTVTVSSASTKGPSVFPLAPSSKSTSGGTA | SGSVASSGSGSATGSAIQMTQ |
| | | monsterExendin-4 | ALGCLVKDYFPEPVTVSWNSGALTSGVHTFPAVLQSSGLYSLKSVVTVPSS | SPSSVSASIGDRVTITCRASQN |
| | | (1-22):: | SLGTQTYICNVNHKPSNTKVDKKVEPKSCDKTHTCPPCPAPELLGGPSVFLF | INNLLAWYQQKPGKAPKLLIY |
| | | 1AQ1K(modV,GS):: | PPKPKDTLMISRTPEVTCVVVDVSHEDPEVKFNWYVDGVEVHNAKTKPCE | TASSLQSEVPSRFSGSGSGTDF |
| | | [hu anti-<huGLP-1R> | EQYGSTYRCVSVLTVLHQDWLNGKEYKCKVSNKALPAPIEKTISKAKGQP | TLTISSLQPEDFAIYSCQQAHR |
| | | 3E6 (C105S) | REPQVYTLPPSREEMTKNQVSLTCLVKGFYPSDIAVEWESNGQPENNYDTT | FPPTFGQGTKVEIRRTVAAPS |
| | | VL]:: huKLC-S176E + | PPVLDSDGSFFLYSDLTVDKSRWQQGNVFSCSVMHEALHNHYTQKSLSLS | VFIFPPSDEQLKSGTASVVCLL |
| | | [anti-<huGIPR> 21- | PGK (SEQ ID NO: 3434) | NNFYPREAKVQWKVDNALQ |
| | | 143_6H1 VH3 | | SGNSQESVTEQDSKDSTYSLE |
| | | VH]:: huIgG1z-SEFL2- | | STLTLSKADYEKHKVYACEV |
| | | EKK + [hu anti- | | THQGLSSPVTKSFNRGEC |
| | | <huGIPR> 21-143_6H1 | | (SEQ ID NO: 3725) |
| | | VK1 VL]:: huKLC- | | |
| | | S176K (Hetero-Ig) | | |
| PL- | iPS: | [hu anti-<huGLP-1R> | QVQLVESGGGVVQPGRSLRLSCAASGFTLSSYGMHWVRKAPGKGLEWVA | HGEGTFTSDLSKQMEEEAVR |
| 47280 | 422977 | 3E6.1 (Q46(39)K) | VIWYDGSNKYYADSVKGRFTISRDNSKNTLYLQMNSLRAEDTAVYYCAR | LFAAQAAQQGGGGSGSATGG |
| | | VH]:: huIgG1z-SEFL2- | GGGSGSYRYYYYGLDVWGQGTTVTVSSASTKGPSVFPLAPSSKSTSGGTA | SGSVASSGSGSATGSAIQMTQ |
| | | KDD + gila | ALGCLVKDYFPEPVTVSWNSGALTSGVHTFPAVLQSSGLYSLKSVVTVPSS | SPSSVSASIGDRVTITCRASQN |
| | | monsterExendin-4 | SLGTQTYICNVNHKPSNTKVDKKVEPKSCDKTHTCPPCPAPELLGGPSVFLF | INNLLAWYQEKPGKAPKLLIY |
| | | (1-22):: | PPKPKDTLMISRTPEVTCVVVDVSHEDPEVKFNWYVDGVEVHNAKTKPCE | TASSLQSEVPSRFSGSGSGTDF |
| | | 1AQ1K(modV,GS):: | EQYGSTYRCVSVLTVLHQDWLNGKEYKCKVSNKALPAPIEKTISKAKGQP | TLTISSLQPEDFAIYSCQQAHR |
| | | [hu anti-<huGLP-1R> | REPQVYTLPPSREEMTKNQVSLTCLVKGFYPSDIAVEWESNGQPENNYDTT | FPPTFGQGTKVEIRRTVAAPS |
| | | 3E6 (Q46(112)E, | PPVLDSDGSFFLYSDLTVDKSRWQQGNVFSCSVMHEALHNHYTQKSLSLS | VFIFPPSDEQLKSGTASVVCLL |
| | | C105S) VL]:: huKLC- | PGK (SEQ ID NO: 3435) | NNFYPREAKVQWKVDNALQ |
| | | S176E + [anti- | | SGNSQESVTEQDSKDSTYSLE |
| | | <huGIPR> 21-143_6H1 | | STLTLSKADYEKHKVYACEV |
| | | VH3 (Q46E) | | THQGLSSPVTKSFNRGEC |
| | | VH]:: huIgG1z-SEFL2- | | (SEQ ID NO: 3726) |
| | | EKK + [hu anti- | | |
| | | <huGIPR> 21-143_6H1 | | |
| | | VK1 (Q46(38)K) | | |
| | | VL]:: huKLC-S176K | | |
| | | (Hetero-Ig) | | |
| PL- | iPS: | [hu anti-<huGLP-1R> | QVQLVESGGGVVQPGRSLRLSCAAS | |
| 47281 | 422978 | 3E6.1 (G51(44)K) | GFTLSSYGMHWVRQAPGKKLEWVA | SSGSGSATGSAIQMTQSPSSVSASIGDRVTITCRASQNINNLLAWYQ |
| | | VH]:: huIgG1z-SEFL2- | VIWYDGSNKYYADSVKGRFTISRDN | QKPGKAPKLLIYTASSLQSEVPSRFSGSGSGTDFTLTISSLQPEDFAIY |
| | | KDD + gila | SKNTLYLQMNSLRAEDTAVYYCAR | SCQQAHRFPPTFGEGTKVEIRRTVAAPSVFIFPPSDEQLKSGTASVVC |
| | | monsterExendin-4 | GGGSGSYRYYYYGLDVWGQGTTVT | LLNNFYPREAKVQWKVDNALQSGNSQESVTEQDSKDSTYSLESTLT |
| | | (1-22):: | VSSASTKGPSVFPLAPSSKSTSGGTA | LSKADYEKHKVYACEVTHQGLSSPVTKSFNRGEC (SEQ ID NO: |
| | | 1AQ1K(modV,GS):: | ALGCLVKDYFPEPVTVSWNSGALTS | 3727) |
| | | [hu anti-<huGLP-1R> | GVHTFPAVLQSSGLYSLKSVVTVPSS | |
| | | 3E6 (C105S, | SLGTQTYICNVNHKPSNTKVDKKVE | |
| | | Q141(174)E) | PKSCDKTHTCPPCPAPELLGGPSVFL | |
| | | VL]:: huKLC-S176E + | FPPKPKDTLMISRTPEVTCVVVDVSH | |
| | | [anti-<huGIPR> 21- | EDPEVKFNWYVDGVEVHNAKTKPC | |
| | | 143_6H1 VH3 (G51E) | EEQYGSTYRCVSVLTVLHQDWLNG | |
| | | VH]:: huIgG1z-SEFL2- | KEYKCKVSNKALPAPIEKTISKAKGQ | |
| | | EKK + [hu anti- | PREPQVYTLPPSREEMTKNQVSLTCL | |
| | | <huGIPR> 21-143_6H1 | VKGFYPSDIAVEWESNGQPENNYDT | |
| | | VK1(P141(100)K) | TPPVLDSDGSFFLYSDLTVDKSRWQ | |
| | | VL]:: huKLC-S176K | QGNVFSCSVMHEALHNHYTQKSLSL | |
| | | (Hetero-Ig) | SPGK (SEQ ID NO: 3436) | |
| PL- | iPS: | [hu anti-<huGIPR> | EIVMTQSPATLSVSPGE | QVQLVESGGGVVQPGRSLRLSCAASGFTFSNYGMHWVRQAPGEGL |
| 46633 | 424468 | 21-143_2G10_LC1 | RATLSCRASQSVSSNL | EWVAAIWFDASDKYYADAVKGRFTISRDNSKNTLYLQMNSLRAED |
| | | VK3 (1-236) VL]:: | AWYQQKPGQAPRLLIY | TAVYYCARDQAIFGVVPDYWGQGTLVTVSSASTKGPSVFPLAPSSK |
| | | huKLC-S176K + [hu | GAATRATGIPARVSGS | STSGGTAALGCLVKDYFPEPVTVSWNSGALTSGVHTFPAVLQSSGL |
| | | anti-<huGIPR> 21- | GSGTEFTLTISSLQSED | YSLESVVTVPSSSLGTQTYICNVNHKPSNTKVDKKVEPKSCDKTHT |
| | | 143_2G10 LC1.003 | FAVYYCQQYNNWPLT | CPPCPAPELLGGPSVFLFPPKPKDTLMISRTPEVTCVVVDVSHEDPEV |
| | | VH3 (1-472)(S73(85)A, | FGGGTKVEIKR (SEQ | KFNWYVDGVEVHNAKTKPCEEQYGSTYRCVSVLTVLHQDWLNGK |
| | | G65(77)A) | ID NO: 3437) | EYKCKVSNKALPAPIEKTISKAKGQPREPQVYTLPPSRKEMTKNQVS |
| | | VH]:: huIgG1z-SEFL2- | | LTCLVKGFYPSDIAVEWESNGQPENNYKTTPPVLKSDGSFFLYSKLT |
| | | EKK + gila | | VDKSRWQQGNVFSCSVMHEALHNHYTQKSLSLSPGK (SEQ ID NO: |
| | | monsterExendin-4(1- | | 3728) |
| | | 22):: | | |
| | | 1AQ1K(modV,GS):: | | |
| | | [hu anti- | | |
| | | <huGLP-1R> 3E6 VL]:: | | |
| | | huKLC-S176E + | | |
| | | [hu anti-<huGLP-1R> | | |
| | | 3E6.1 | | |
| | | VH]:: huIgG1z-SEFL2- | | |
| | | KDD (Hetero- | | |
| | | Ig) | | |
| PL- | iPS: | [hu anti-<huGIPR> | EIVMTQSPATLSVSPGE | QVQLVESGGGVVQPGRSLRLSCAASGFTFSNYGMHWVRQAPGEGL |
| 46634 | 424470 | 21-143_2G10_LC1 | RATLSCRASQSVSSNL | EWVAAIWFDASDKYYADAVKGRFTISRDNSKNTLYLQMNSLRAED |
| | | VK3 (1-236) VL]:: | AWYQQKPGQAPRLLIY | TAVYYCARDQAIFGVVPDYWGQGTLVTVSSASTKGPSVFPLAPSSK |
| | | huKLC-S176K + [hu | GAATRATGIPARVSGS | STSGGTAALGCLVKDYFPEPVTVSWNSGALTSGVHTFPAVLQSSGL |
| | | anti-<huGIPR> 21- | GSGTEFTLTISSLQSED | YSLESVVTVPSSSLGTQTYICNVNHKPSNTKVDKKVEPKSCDKTHT |
| | | 143_2G10_LC1.003 | FAVYYCQQYNNWPLT | CPPCPAPELLGGPSVFLFPPKPKDTLMISRTPEVTCVVVDVSHEDPEV |
| | | VH3 (1-472)(S73(85)A, | FGGGTKVEIKR (SEQ | KFNWYVDGVEVHNAKTKPCEEQYGSTYRCVSVLTVLHQDWLNGK |
| | | G65(77)A) | ID NO: 3438) | EYKCKVSNKALPAPIEKTISKAKGQPREPQVYTLPPSRKEMTKNQVS |
| | | VH]:: huIgG1z-SEFL2- | | LTCLVKGFYPSDIAVEWESNGQPENNYKTTPPVLKSDGSFFLYSKLT |
| | | EKK + gila | | VDKSRWQQGNVFSCSVMHEALHNHYTQKSLSLSPGK (SEQ ID NO: |
| | | monsterExendin-4(1- | | 3729) |
| | | [hu anti- | | |
| | | <huGLP-1R> 3E6 | | |
| | | (C105Y) | | |
| | | VL]:: huKLC-S176E + | | |
| | | [hu anti-<huGLP-1R> | | |
| | | 3E6.1 VH]:: | | |
| | | huIgG1z- | | |
| | | SEFL2-KDD (Hetero-Ig) | | |
| PL- | iPS: | [hu anti-<huGIPR> | EIVMTQSPATLSVSPGE | QVQLVESGGGVVQPGRSLRLSCAASGFTFSNYGMHWVRQAPGEGL |
| 46635 | 424471 | 21-143_2G10_LC1 | RATLSCRASQSVSSNL | EWVAAIWFDASDKYYADAVKGRFTISRDNSKNTLYLQMNSLRAED |
| | | VK3 (1-236) VL]:: | AWYQQKPGQAPRLLIY | TAVYYCARDQAIFGVVPDYWGQGTLVTVSSASTKGPSVFPLAPSSK |
| | | huKLC-S176K + [hu | GAATRATGIPARVSGS | STSGGTAALGCLVKDYFPEPVTVSWNSGALTSGVHTFPAVLQSSGL |
| | | anti-<huGIPR> 21- | GSGTEFTLTISSLQSED | YSLESVVTVPSSSLGTQTYICNVNHKPSNTKVDKKVEPKSCDKTHT |
| | | 143_2G10_LC1.003 | FAVYYCQQYNNWPLT | CPPCPAPELLGGPSVFLFPPKPKDTLMISRTPEVTCVVVDVSHEDPEV |
| | | VH3 (1-472)(S73(85)A, | FGGGTKVEIKR (SEQ | KFNWYVDGVEVHNAKTKPCEEQYGSTYRCVSVLTVLHQDWLNGK |
| | | G65(77)A) | ID NO: 3439) | EYKCKVSNKALPAPIEKTISKAKGQPREPQVYTLPPSRKEMTKNQVS |
| | | VH]:: huIgG1z-SEFL2- | | LTCLVKGFYPSDIAVEWESNGQPENNYKTTPPVLKSDGSFFLYSKLT |
| | | EKK + gila | | VDKSRWQQGNVFSCSVMHEALHNHYTQKSLSLSPGK (SEQ ID NO: |
| | | monsterExendin-4 | | 3730) |
| | | (1-22):: | | |
| | | 1AQ1K(modV,GS):: | | |
| | | [hu anti-<huGLP-1R> | | |
| | | 3E6 (C105S) | | |
| | | VL]:: huKLC-S176E + | | |
| | | [hu anti-<huGLP-1R> | | |
| | | 3E6.1 VH]:: | | |
| | | huIgG1z- | | |
| | | SEFL2-KDD (Hetero-Ig) | | |
| PL- | iPS: | [hu anti-<huGIPR> | EIVMTQSPATLSVSPGE | QVQLVESGGGVVQPGRSLRLSCAASGFTFSNYGMHWVRQAPGEGL |
| 46636 | 424473 | 21-143_2G10_LC1 | RATLSCRASQSVSSNL | EWVAAIWFDASDKYYADAVKGRFTISRDNSKNTLYLQMNSLRAED |
| | | VK3 (1-236) VL]:: | AWYQQKPGQAPRLLIY | TAVYYCARDQAIFGVVPDYWGQGTLVTVSSASTKGPSVFPLAPSSK |
| | | huKLC-S176K + [hu | GAATRATGIPARVSGS | STSGGTAALGCLVKDYFPEPVTVSWNSGALTSGVHTFPAVLQSSGL |
| | | anti-<huGIPR> | GSGTEFTLTISSLQSED | YSLESVVTVPSSSLGTQTYICNVNHKPSNTKVDKKVEPKSCDKTHT |
| | | 21-143_2G10_LC1.003 | FAVYYCQQYNNWPLT | CPPCPAPELLGGPSVFLFPPKPKDTLMISRTPEVTCVVVDVSHEDPEV |
| | | VH3 (1-472)(S73(85)A, | FGGGTKVEIKR (SEQ | KFNWYVDGVEVHNAKTKPCEEQYGSTYRCVSVLTVLHQDWLNGK |
| | | G65(77)A) | ID NO: 3440) | EYKCKVSNKALPAPIEKTISKAKGQPREPQVYTLPPSRKEMTKNQVS |
| | | VH]:: huIgG1z-SEFL2- | | LTCLVKGFYPSDIAVEWESNGQPENNYKTTPPVLKSDGSFFLYSKLT |
| | | EKK + gila | | VDKSRWQQGNVFSCSVMHEALHNHYTQKSLSLSPGK (SEQ ID NO: |
| | | monsterExendin-4 | | 3731) |
| | | (1-22)(G2S):: | | |
| | | 1AQ1K(modV,GS):: | | |
| | | [hu anti- | | |
| | | <huGLP-1R> 3E6 | | |
| | | (C105Y) | | |
| | | VL]:: huKLC-S176E + | | |
| | | [hu anti-<huGLP-1R> | | |
| | | 3E6.1 VH]:: | | |
| | | huIgG1z- | | |
| | | SEFL2-KDD (Hetero-Ig) | | |
| PL- | iPS: | [hu anti-<huGIPR> | EIVMTQSPATLSVSPGE | QVQLVESGGGVVQPGRSLRLSCAASGFTFSNYGMHWVRQAPGEGL |
| 46637 | 424474 | 21-143_2G10_LC1 | RATLSCRASQSVSSNL | EWVAAIWFDASDKYYADAVKGRFTISRDNSKNTLYLQMNSLRAED |
| | | VK3 (1-236) VL]:: | AWYQQKPGQAPRLLIY | TAVYYCARDQAIFGVVPDYWGQGTLVTVSSASTKGPSVFPLAPSSK |
| | | huKLC-S176K + [hu | GAATRATGIPARVSGS | STSGGTAALGCLVKDYFPEPVTVSWNSGALTSGVHTFPAVLQSSGL |
| | | anti-<huGIPR> 21- | GSGTEFTLTISSLQSED | YSLESVVTVPSSSLGTQTYICNVNHKPSNTKVDKKVEPKSCDKTHT |
| | | 143_2G10_LC1.003 | FAVYYCQQYNNWPLT | CPPCPAPELLGGPSVFLFPPKPKDTLMISRTPEVTCVVVDVSHEDPEV |
| | | VH3 (1-472)(S73(85)A, | FGGGTKVEIKR (SEQ | KFNWYVDGVEVHNAKTKPCEEQYGSTYRCVSVLTVLHQDWLNGK |
| | | G65(77)A) | ID NO: 3441) | EYKCKVSNKALPAPIEKTISKAKGQPREPQVYTLPPSRKEMTKNQVS |
| | | VH]:: huIgG1z-SEFL2- | | LTCLVKGFYPSDIAVEWESNGQPENNYKTTPPVLKSDGSFFLYSKLT |
| | | EKK + gila | | VDKSRWQQGNVFSCSVMHEALHNHYTQKSLSLSPGK (SEQ ID NO: |
| | | monsterExendin-4 | | 3732) |
| | | (1-22)(G2S,E3Q):: | | |
| | | 1AQ1K(modV,GS):: | | |
| | | [hu anti-<huGLP-1R> | | |
| | | 3E6 (C105Y) | | |
| | | VL]:: huKLC-S176E + | | |
| | | [hu anti-<huGLP-1R> | | |
| | | 3E6.1 VH]:: huIgG1z- | | |
| | | SEFL2-KDD (Hetero-Ig) | | |
| PL- | iPS: | [hu anti-<huGIPR> | EIVMTQSPATLSVSPGE | QVQLVESGGGVVQPGRSLRLSCAASGFTFSNYGMHWVRQAPGEGL |
| 46638 | 424476 | 21-143_2G10_LC1 | RATLSCRASQSVSSNL | EWVAAIWFDASDKYYADAVKGRFTISRDNSKNTLYLQMNSLRAED |
| | | VK3 (1-236) VL]:: | AWYQQKPGQAPRLLIY | TAVYYCARDQAIFGVVPDYWGQGTLVTVSSASTKGPSVFPLAPSSK |
| | | huKLC-S176K + [hu | GAATRATGIPARVSGS | STSGGTAALGCLVKDYFPEPVTVSWNSGALTSGVHTFPAVLQSSGL |
| | | anti-<huGIPR> | GSGTEFTLTISSLQSED | YSLESVVTVPSSSLGTQTYICNVNHKPSNTKVDKKVEPKSCDKTHT |
| | | 21-143_2G10_LC1.003 | FAVYYCQQYNNWPLT | CPPCPAPELLGGPSVFLFPPKPKDTLMISRTPEVTCVVVDVSHEDPEV |
| | | VH3 (1-472)(S73(85)A, | FGGGTKVEIKR (SEQ | KFNWYVDGVEVHNAKTKPCEEQYGSTYRCVSVLTVLHQDWLNGK |
| | | G65(77)A) | ID NO: 3442) | EYKCKVSNKALPAPIEKTISKAKGQPREPQVYTLPPSRKEMTKNQVS |
| | | VH]:: huIgG1z- | | LTCLVKGFYPSDIAVEWESNGQPENNYKTTPPVLKSDGSFFLYSKLT |
| | | SEFL2-EKK + gila | | VDKSRWQQGNVFSCSVMHEALHNHYTQKSLSLSPGK (SEQ ID NO: |
| | | monsterExendin-4 | | 3733) |
| | | (1-22)(E3D):: | | |
| | | 1AQ1K(modV,GS):: [hu | | |
| | | anti-<huGLP-1R> 3E6 | | |
| | | (C105Y) | | |
| | | VL]:: huKLC-S176E + | | |
| | | [hu anti-<huGLP-1R> | | |
| | | 3E6.1 VH]:: huIgG1z- | | |
| | | SEFL2-KDD (Hetero-Ig) | | |
| PL- | iPS: | [hu anti-<huGIPR> | EIVMTQSPATLSVSPGE | QVQLVESGGGVVQPGRSLRLSCAASGFTFSNYGMHWVRQAPGEGL |
| 46639 | 424477 | 21-143_2G10_LC1 | RATLSCRASQSVSSNL | EWVAAIWFDASDKYYADAVKGRFTISRDNSKNTLYLQMNSLRAED |
| | | VK3 (1-236) VL]:: | AWYQQKPGQAPRLLIY | TAVYYCARDQAIFGVVPDYWGQGTLVTVSSASTKGPSVFPLAPSSK |
| | | huKLC-S176K + [hu | GAATRATGIPARVSGS | STSGGTAALGCLVKDYFPEPVTVSWNSGALTSGVHTFPAVLQSSGL |
| | | anti-<huGIPR> | GSGTEFTLTISSLQSED | YSLESVVTVPSSSLGTQTYICNVNHKPSNTKVDKKVEPKSCDKTHT |
| | | 21-143_2G10_LC1.003 | FAVYYCQQYNNWPLT | CPPCPAPELLGGPSVFLFPPKPKDTLMISRTPEVTCVVVDVSHEDPEV |
| | | VH3 (1-472)(S73(85)A, | FGGGTKVEIKR (SEQ | KFNWYVDGVEVHNAKTKPCEEQYGSTYRCVSVLTVLHQDWLNGK |
| | | G65(77)A) | ID NO: 3443) | EYKCKVSNKALPAPIEKTISKAKGQPREPQVYTLPPSRKEMTKNQVS |
| | | VH]:: huIgG1z-SEFL2- | | LTCLVKGFYPSDIAVEWESNGQPENNYKTTPPVLKSDGSFFLYSKLT |
| | | EKK + gila | | VDKSRWQQGNVFSCSVMHEALHNHYTQKSLSLSPGK (SEQ ID NO: |
| | | monsterExendin-4 | | 3734) |
| | | (1-22)(G2S,E3D):: | | |
| | | 1AQ1K(modV,GS):: [hu | | |
| | | anti-<huGLP-1R> | | |
| | | 3E6 (C105Y) | | |
| | | VL]:: huKLC-S176E + | | |
| | | [hu anti-<huGLP-1R> | | |
| | | 3E6.1 VH]:: huIgG1z- | | |
| | | SEFL2-KDD (Hetero-Ig) | | |
| PL- | iPS: | [hu anti-<huGIPR> | EIVMTQSPATLSVSPGE | QVQLVESGGGVVQPGRSLRLSCAASGFTFSNYGMHWVRQAPGEGL |
| 46640 | 424479 | 21-143_2G10_LC1 | RATLSCRASQSVSSNL | EWVAAIWFDASDKYYADAVKGRFTISRDNSKNTLYLQMNSLRAED |
| | | VK3 (1-236) VL]:: | AWYQQKPGQAPRLLIY | TAVYYCARDQAIFGVVPDYWGQGTLVTVSSASTKGPSVFPLAPSSK |
| | | huKLC-S176K + [hu | GAATRATGIPARVSGS | STSGGTAALGCLVKDYFPEPVTVSWNSGALTSGVHTFPAVLQSSGL |
| | | anti-<huGIPR> | GSGTEFTLTISSLQSED | YSLESVVTVPSSSLGTQTYICNVNHKPSNTKVDKKVEPKSCDKTHT |
| | | 21-143 2G10 LC1.003 | FAVYYCQQYNNWPLT | CPPCPAPELLGGPSVFLFPPKPKDTLMISRTPEVTCVVVDVSHEDPEV |
| | | VH3 (1-472)(S73(85)A, | FGGGTKVEIKR (SEQ | KFNWYVDGVEVHNAKTKPCEEQYGSTYRCVSVLTVLHQDWLNGK |
| | | G65(77)A) | ID NO: 3444) | EYKCKVSNKALPAPIEKTISKAKGQPREPQVYTLPPSRKEMTKNQVS |
| | | VH]:: huIgG1z-SEFL2- | | LTCLVKGFYPSDIAVEWESNGQPENNYKTTPPVLKSDGSFFLYSKLT |
| | | EKK + gila | | VDKSRWQQGNVFSCSVMHEALHNHYTQKSLSLSPGK (SEQ ID NO: |
| | | monsterExendin-4 | | 3735) |
| | | (1-22)(G2S):: | | |
| | | 1AQ1K(modV,GS):: [hu | | |
| | | anti-<huGLP-1R> | | |
| | | 3E6 (C105S) | | |
| | | VL]:: huKLC-S176E + | | |
| | | [hu anti-<huGLP-1R> | | |
| | | 3E6.1 VH]:: huIgG1z- | | |
| | | SEFL2-KDD (Hetero-Ig) | | |
| PL- | iPS: | [hu anti-<huGIPR> | EIVMTQSPATLSVSPGE | QVQLVESGGGVVQPGRSLRLSCAASGFTFSNYGMHWVRQAPGEGL |
| 46641 | 424480 | 21-143_2G10_LC1 | RATLSCRASQSVSSNL | EWVAAIWFDASDKYYADAVKGRFTISRDNSKNTLYLQMNSLRAED |
| | | VK3 (1-236) VL]:: | AWYQQKPGQAPRLLIY | TAVYYCARDQAIFGVVPDYWGQGTLVTVSSASTKGPSVFPLAPSSK |
| | | huKLC-S176K + [hu | GAATRATGIPARVSGS | STSGGTAALGCLVKDYFPEPVTVSWNSGALTSGVHTFPAVLQSSGL |
| | | anti-<huGIPR> | GSGTEFTLTISSLQSED | YSLESVVTVPSSSLGTQTYICNVNHKPSNTKVDKKVEPKSCDKTHT |
| | | 21-143 2G10 LC1.003 | FAVYYCQQYNNWPLT | CPPCPAPELLGGPSVFLFPPKPKDTLMISRTPEVTCVVVDVSHEDPEV |
| | | VH3 (1-472)(S73(85)A, | FGGGTKVEIKR (SEQ | KFNWYVDGVEVHNAKTKPCEEQYGSTYRCVSVLTVLHQDWLNGK |
| | | G65(77)A) | ID NO: 3445) | EYKCKVSNKALPAPIEKTISKAKGQPREPQVYTLPPSRKEMTKNQVS |
| | | VH]:: huIgG1z-SEFL2- | | LTCLVKGFYPSDIAVEWESNGQPENNYKTTPPVLKSDGSFFLYSKLT |
| | | EKK + gila | | VDKSRWQQGNVFSCSVMHEALHNHYTQKSLSLSPGK (SEQ ID NO: |
| | | monsterExendin-4 | | 3736) |
| | | (1-22)(G2S,E3Q):: | | |
| | | 1AQ1K(modV,GS):: [hu | | |
| | | anti-<huGLP-1R> | | |
| | | 3E6 (C105S) | | |
| | | VL]:: huKLC-S176E + | | |
| | | [hu anti-<huGLP-1R> | | |
| | | 3E6.1 VH]:: huIgG1z- | | |
| | | SEFL2-KDD (Hetero-Ig) | | |
| PL- | iPS: | [hu anti-<huGIPR> | EIVMTQSPATLSVSPGE | QVQLVESGGGVVQPGRSLRLSCAASGFTFSNYGMHWVRQAPGEGL |
| 46642 | 424482 | 21-143_2G10_LC1 | RATLSCRASQSVSSNL | EWVAAIWFDASDKYYADAVKGRFTISRDNSKNTLYLQMNSLRAED |
| | | VK3 (1-236) VL]:: | AWYQQKPGQAPRLLIY | TAVYYCARDQAIFGVVPDYWGQGTLVTVSSASTKGPSVFPLAPSSK |
| | | huKLC-S176K + [hu | GAATRATGIPARVSGS | STSGGTAALGCLVKDYFPEPVTVSWNSGALTSGVHTFPAVLQSSGL |
| | | anti-<huGIPR> | GSGTEFTLTISSLQSED | YSLESVVTVPSSSLGTQTYICNVNHKPSNTKVDKKVEPKSCDKTHT |
| | | 21-143_2G10_LC1.003 | FAVYYCQQYNNWPLT | CPPCPAPELLGGPSVFLFPPKPKDTLMISRTPEVTCVVVDVSHEDPEV |
| | | VH3 (1-472)(S73(85)A, | FGGGTKVEIKR (SEQ | KFNWYVDGVEVHNAKTKPCEEQYGSTYRCVSVLTVLHQDWLNGK |
| | | G65(77)A) | ID NO: 3446) | EYKCKVSNKALPAPIEKTISKAKGQPREPQVYTLPPSRKEMTKNQVS |
| | | VH]:: huIgG1z-SEFL2- | | LTCLVKGFYPSDIAVEWESNGQPENNYKTTPPVLKSDGSFFLYSKLT |
| | | EKK + gila | | VDKSRWQQGNVFSCSVMHEALHNHYTQKSLSLSPGK (SEQ ID NO: |
| | | monsterExendin-4 | | 3737) |
| | | (1-22)(E3D):: | | |
| | | 1AQ1K(modV,GS):: [hu | | |
| | | anti-<huGLP-1R> | | |
| | | 3E6 (C105S) | | |
| | | VL]:: huKLC-S176E + | | |
| | | [hu anti-<huGLP-1R> | | |
| | | 3E6.1 VH]:: huIgG1z- | | |
| | | SEFL2-KDD (Hetero-Ig) | | |
| PL- | iPS: | [hu anti-<huGIPR> | EIVMTQSPATLSVSPGE | QVQLVESGGGVVQPGRSLRLSCAASGFTFSNYGMHWVRQAPGEGL |
| 46643 | 424483 | 21-143_2G10_LC1 | RATLSCRASQSVSSNL | EWVAAIWFDASDKYYADAVKGRFTISRDNSKNTLYLQMNSLRAED |
| | | VK3 (1-236) VL]:: | AWYQQKPGQAPRLLIY | TAVYYCARDQAIFGVVPDYWGQGTLVTVSSASTKGPSVFPLAPSSK |
| | | huKLC-S176K + [hu | GAATRATGIPARVSGS | STSGGTAALGCLVKDYFPEPVTVSWNSGALTSGVHTFPAVLQSSGL |
| | | anti-<huGIPR> | GSGTEFTLTISSLQSED | YSLESVVTVPSSSLGTQTYICNVNHKPSNTKVDKKVEPKSCDKTHT |
| | | 21-143_2G10_LC1.003 | FAVYYCQQYNNWPLT | CPPCPAPELLGGPSVFLFPPKPKDTLMISRTPEVTCVVVDVSHEDPEV |
| | | VH3 (1-472)(S73(85)A, | FGGGTKVEIKR (SEQ | KFNWYVDGVEVHNAKTKPCEEQYGSTYRCVSVLTVLHQDWLNGK |
| | | G65(77)A) | ID NO: 3447) | EYKCKVSNKALPAPIEKTISKAKGQPREPQVYTLPPSRKEMTKNQVS |
| | | VH]:: huIgG1z-SEFL2- | | LTCLVKGFYPSDIAVEWESNGQPENNYKTTPPVLKSDGSFFLYSKLT |
| | | EKK + gila | | VDKSRWQQGNVFSCSVMHEALHNHYTQKSLSLSPGK (SEQ ID NO: |
| | | monsterExendin-4 | | 3738) |
| | | (1-22)(G2S,E3D):: | | |
| | | 1AQ1K(modV,GS):: | | |
| | | [hu anti-<huGLP-1R> | | |
| | | 3E6 (C105S) | | |
| | | VL]:: huKLC-S176E + | | |
| | | [hu anti-<huGLP-1R> | | |
| | | 3E6.1 VH]:: huIgG1z- | | |
| | | SEFL2-KDD (Hetero-Ig) | | |
| PL- | iPS: | [hu anti-<huGIPR> | EIVMTQSPATLSVSPGE | QVQLVESGGGVVQPGRSLRLSCAASGFTFSNYGMHWVREAPGEGL |
| 46644 | 424485 | 21-143_2G10_LC1 | RATLSCRASQSVSSNL | EWVAAIWFDASDKYYADAVKGRFTISRDNSKNTLYLQMNSLRAED |
| | | VK3 (1-236)(Q46(38)K) | AWYQKKPGQAPRLLIY | TAVYYCARDQAIFGVVPDYWGQGTLVTVSSASTKGPSVFPLAPSSK |
| | | VL]:: huKLC- | GAATRATGIPARVSGS | STSGGTAALGCLVKDYFPEPVTVSWNSGALTSGVHTFPAVLQSSGL |
| | | S176K + [hu anti | GSGTEFTLTISSLQSED | YSLESVVTVPSSSLGTQTYICNVNHKPSNTKVDKKVEPKSCDKTHT |
| | | <huGIPR> 21- | FAVYYCQQYNNWPLT | CPPCPAPELLGGPSVFLFPPKPKDTLMISRTPEVTCVVVDVSHEDPEV |
| | | 143_2G10_LC1.003 | FGGGTKVEIKRTVAAP | KFNWYVDGVEVHNAKTKPCEEQYGSTYRCVSVLTVLHQDWLNGK |
| | | VH3 (1-472)(Q46(38) | SVFIFPPSDEQLKSGTA | EYKCKVSNKALPAPIEKTISKAKGQPREPQVYTLPPSRKEMTKNQVS |
| | | E, S73(85)A,G65(77)A) | SVVCLLNNFYPREAKV | LTCLVKGFYPSDIAVEWESNGQPENNYKTTPPVLKSDGSFFLYSKLT |
| | | VH]:: huIgG1z-SEFL2- | QWKVDNALQSGNSQE | VDKSRWQQGNVFSCSVMHEALHNHYTQKSLSLSPGK (SEQ ID NO: |
| | | EKK + gila | SVTEQDSKDSTYSLKS | 3739) |
| | | monsterExendin-4 | TLTLSKADYEKHKVY | |
| | | (1-22):: | ACEVTHQGLSSPVTKS | |
| | | 1AQ1K(modV,GS):: | FNRGEC (SEQ ID NO: | |
| | | [hu anti-<huGLP-1R> | 3448) | |
| | | 3E6 (Q46(112)E) | | |
| | | VL]:: huKLC-S176E + | | |
| | | [hu anti-<huGLP-1R> | | |
| | | 3E6.1 (Q46(39)K) | | |
| | | VH]:: huIgG1z-SEFL2- | | |
| | | KDD (Hetero-Ig) | | |
| PL- | iPS: | [hu anti-<huGIPR> | EIVMTQSPATLSVSPGE | QVQLVESGGGVVQPGRSLRLSCAASGFTFSNYGMHWVREAPGEGL |
| 46645 | 424486 | 21-143_2G10_LC1 | RATLSCRASQSVSSNL | EWVAAIWFDASDKYYADAVKGRFTISRDNSKNTLYLQMNSLRAED |
| | | VK3 (1-236)(Q46(38) | AWYQKKPGQAPRLLIY | TAVYYCARDQAIFGVVPDYWGQGTLVTVSSASTKGPSVFPLAPSSK |
| | | K) VL]:: huKLC- | GAATRATGIPARVSGS | STSGGTAALGCLVKDYFPEPVTVSWNSGALTSGVHTFPAVLQSSGL |
| | | S176K + [hu anti- | GSGTEFTLTISSLQSED | YSLESVVTVPSSSLGTQTYICNVNHKPSNTKVDKKVEPKSCDKTHT |
| | | <huGIPR> 21- | FAVYYCQQYNNWPLT | CPPCPAPELLGGPSVFLFPPKPKDTLMISRTPEVTCVVVDVSHEDPEV |
| | | 143_2G10_LC1.003 | FGGGTKVEIKRTVAAP | KFNWYVDGVEVHNAKTKPCEEQYGSTYRCVSVLTVLHQDWLNGK |
| | | VH3 (1-472)(Q46(38)E, | SVFIFPPSDEQLKSGTA | EYKCKVSNKALPAPIEKTISKAKGQPREPQVYTLPPSRKEMTKNQVS |
| | | S73(85)A,G65(77)A) | SVVCLLNNFYPREAKV | LTCLVKGFYPSDIAVEWESNGQPENNYKTTPPVLKSDGSFFLYSKLT |
| | | VH]:: huIgG1z-SEFL2- | QWKVDNALQSGNSQE | VDKSRWQQGNVFSCSVMHEALHNHYTQKSLSLSPGK (SEQ ID NO: |
| | | EKK + gila | SVTEQDSKDSTYSLKS | 3740) |
| | | monsterExendin-4 | TLTLSKADYEKHKVY | |
| | | (1-22):: | ACEVTHQGLSSPVTKS | |
| | | 1AQ1K(modV,GS):: | FNRGEC (SEQ ID NO: | |
| | | [hu anti-<huGLP-1R> | 3449) | |
| | | 3E6 (Q46(112)E, | | |
| | | C105Y)VL]:: | | |
| | | huKLC-S176E + [hu | | |
| | | anti-<huGLP-1R> | | |
| | | 3E6.1 (Q46(39)K) | | |
| | | VH]:: huIgG1z-SEFL2- | | |
| | | KDD (Hetero-Ig) | | |
| PL- | iPS: | [hu anti-<huGIPR> | EIVMTQSPATLSVSPGE | QVQLVESGGGVVQPGRSLRLSCAASGFTFSNYGMHWVREAPGEGL |
| 46646 | 424487 | 21-143_2G10 LC1 | RATLSCRASQSVSSNL | EWVAAIWFDASDKYYADAVKGRFTISRDNSKNTLYLQMNSLRAED |
| | | VK3 (1-236)(Q46(38)K) | AWYQKKPGQAPRLLIY | TAVYYCARDQAIFGVVPDYWGQGTLVTVSSASTKGPSVFPLAPSSK |
| | | VL]:: huKLC- | GAATRATGIPARVSGS | STSGGTAALGCLVKDYFPEPVTVSWNSGALTSGVHTFPAVLQSSGL |
| | | S176K + [hu anti- | GSGTEFTLTISSLQSED | YSLESVVTVPSSSLGTQTYICNVNHKPSNTKVDKKVEPKSCDKTHT |
| | | <huGIPR> 21- | FAVYYCQQYNNWPLT | CPPCPAPELLGGPSVFLFPPKPKDTLMISRTPEVTCVVVDVSHEDPEV |
| | | 143_2G10_LC1.003 VH3 | FGGGTKVEIKRTVAAP | KFNWYVDGVEVHNAKTKPCEEQYGSTYRCVSVLTVLHQDWLNGK |
| | | (1-472)(Q46(38)E, | SVFIFPPSDEQLKSGTA | EYKCKVSNKALPAPIEKTISKAKGQPREPQVYTLPPSRKEMTKNQVS |
| | | S73(85)A,G65(77)A) | SVVCLLNNFYPREAKV | LTCLVKGFYPSDIAVEWESNGQPENNYKTTPPVLKSDGSFFLYSKLT |
| | | VH]:: huIgG1z-SEFL2- | QWKVDNALQSGNSQE | VDKSRWQQGNVFSCSVMHEALHNHYTQKSLSLSPGK (SEQ ID NO: |
| | | EKK + gila | SVTEQDSKDSTYSLKS | 3741) |
| | | monsterExendin-4 | TLTLSKADYEKHKVY | |
| | | (1-22):: | ACEVTHQGLSSPVTKS | |
| | | 1AQ1K(modV,GS):: [hu | FNRGEC (SEQ ID NO: | |
| | | anti-<huGLP-1R> 3E6 | 3450) | |
| | | (Q46(112)E, C105S) | | |
| | | VL]:: huKLC-S176E + | | |
| | | [hu anti-<huGLP-1R> | | |
| | | 3E6.1 (Q46(39)K) | | |
| | | VH]:: huIgG1z-SEFL2- | | |
| | | KDD (Hetero-Ig) | | |
| PL- | iPS: | [hu anti-<huGIPR> | EIVMTQSPATLSVSPGE | QVQLVESGGGVVQPGRSLRLSCAASGFTFSNYGMHWVREAPGEGL |
| 46647 | 424488 | 21-143 2G10 LC1 | RATLSCRASQSVSSNL | EWVAAIWFDASDKYYADAVKGRFTISRDNSKNTLYLQMNSLRAED |
| | | VK3 (1-236)(Q46(38)K) | AWYQKKPGQAPRLLIY | TAVYYCARDQAIFGVVPDYWGQGTLVTVSSASTKGPSVFPLAPSSK |
| | | VL]:: huKLC- | GAATRATGIPARVSGS | STSGGTAALGCLVKDYFPEPVTVSWNSGALTSGVHTFPAVLQSSGL |
| | | S176K + [hu anti- | GSGTEFTLTISSLQSED | YSLESVVTVPSSSLGTQTYICNVNHKPSNTKVDKKVEPKSCDKTHT |
| | | <huGIPR> 21- | FAVYYCQQYNNWPLT | CPPCPAPELLGGPSVFLFPPKPKDTLMISRTPEVTCVVVDVSHEDPEV |
| | | 143_2G10_LC1.003 VH3 | FGGGTKVEIKRTVAAP | KFNWYVDGVEVHNAKTKPCEEQYGSTYRCVSVLTVLHQDWLNGK |
| | | (1-472)(Q46(38)E, | SVFIFPPSDEQLKSGTA | EYKCKVSNKALPAPIEKTISKAKGQPREPQVYTLPPSRKEMTKNQVS |
| | | S73(85)A,G65(77)A) | SVVCLLNNFYPREAKV | LTCLVKGFYPSDIAVEWESNGQPENNYKTTPPVLKSDGSFFLYSKLT |
| | | VH]:: huIgG1z-SEFL2- | QWKVDNALQSGNSQE | VDKSRWQQGNVFSCSVMHEALHNHYTQKSLSLSPGK (SEQ ID NO: |
| | | EKK + gila | SVTEQDSKDSTYSLKS | 3742) |
| | | monsterExendin-4 | TLTLSKADYEKHKVY | |
| | | (1-22)(G2S):: | ACEVTHQGLSSPVTKS | |
| | | 1AQ1K(modV,GS):: [hu | FNRGEC (SEQ ID NO: | |
| | | anti-<huGLP-1R> | 3451) | |
| | | 3E6 (C105Y, Q46E) | | |
| | | VL]:: huKLC-S176E + | | |
| | | [hu anti-<huGLP-1R> | | |
| | | 3E6.1 (Q46(39)K) | | |
| | | VH]:: huIgG1z-SEFL2- | | |
| | | KDD (Hetero-Ig) | | |
| PL- | iPS: | [hu anti-<huGIPR> | EIVMTQSPATLSVSPGE | QVQLVESGGGVVQPGRSLRLSCAASGFTFSNYGMHWVREAPGEGL |
| 46648 | 424489 | 21-143_2G10 LC1 | RATLSCRASQSVSSNL | EWVAAIWFDASDKYYADAVKGRFTISRDNSKNTLYLQMNSLRAED |
| | | VK3 (1-236)(Q46(38)K) | AWYQKKPGQAPRLLIY | TAVYYCARDQAIFGVVPDYWGQGTLVTVSSASTKGPSVFPLAPSSK |
| | | VL]:: huKLC- | GAATRATGIPARVSGS | STSGGTAALGCLVKDYFPEPVTVSWNSGALTSGVHTFPAVLQSSGL |
| | | S176K + [hu anti- | GSGTEFTLTISSLQSED | YSLESVVTVPSSSLGTQTYICNVNHKPSNTKVDKKVEPKSCDKTHT |
| | | <huGIPR> 21- | FAVYYCQQYNNWPLT | CPPCPAPELLGGPSVFLFPPKPKDTLMISRTPEVTCVVVDVSHEDPEV |
| | | 143_2G10_LC1.003 VH3 | FGGGTKVEIKRTVAAP | KFNWYVDGVEVHNAKTKPCEEQYGSTYRCVSVLTVLHQDWLNGK |
| | | (1-472)(Q46(38)E, | SVFIFPPSDEQLKSGTA | EYKCKVSNKALPAPIEKTISKAKGQPREPQVYTLPPSRKEMTKNQVS |
| | | S73(85)A,G65(77)A) | SVVCLLNNFYPREAKV | LTCLVKGFYPSDIAVEWESNGQPENNYKTTPPVLKSDGSFFLYSKLT |
| | | VH]:: huIgG1z-SEFL2- | QWKVDNALQSGNSQE | VDKSRWQQGNVFSCSVMHEALHNHYTQKSLSLSPGK (SEQ ID NO: |
| | | EKK + gila | SVTEQDSKDSTYSLKS | 3743) |
| | | monsterExendin-4 | TLTLSKADYEKHKVY | |
| | | (1-22)(G2S,E3Q):: | ACEVTHQGLSSPVTKS | |
| | | 1AQ1K(modV,GS):: | FNRGEC (SEQ ID NO: | |
| | | [hu anti-<huGLP-1R> | 3452) | |
| | | 3E6 (C105Y, Q46E) | | |
| | | VL]:: huKLC-S176E + | | |
| | | [hu anti-<huGLP-1R> | | |
| | | 3E6.1 (Q46(39)K) | | |
| | | VH]:: huIgG1z-SEFL2- | | |
| | | KDD (Hetero-Ig) | | |
| PL- | iPS: | [hu anti-<huGIPR> | EIVMTQSPATLSVSPGE | QVQLVESGGGVVQPGRSLRLSCAASGFTFSNYGMHWVREAPGEGL |
| 46649 | 424490 | 21-143_2G10_LC1 | RATLSCRASQSVSSNL | EWVAAIWFDASDKYYADAVKGRFTISRDNSKNTLYLQMNSLRAED |
| | | VK3 (1-236)(Q46(38)K) | AWYQKKPGQAPRLLIY | TAVYYCARDQAIFGVVPDYWGQGTLVTVSSASTKGPSVFPLAPSSK |
| | | VL]:: huKLC- | GAATRATGIPARVSGS | STSGGTAALGCLVKDYFPEPVTVSWNSGALTSGVHTFPAVLQSSGL |
| | | S176K + [hu anti- | GSGTEFTLTISSLQSED | YSLESVVTVPSSSLGTQTYICNVNHKPSNTKVDKKVEPKSCDKTHT |
| | | <huGIPR> 21- | FAVYYCQQYNNWPLT | CPPCPAPELLGGPSVFLFPPKPKDTLMISRTPEVTCVVVDVSHEDPEV |
| | | 143_2G10_LC1.003 VH3 | FGGGTKVEIKRTVAAP | KFNWYVDGVEVHNAKTKPCEEQYGSTYRCVSVLTVLHQDWLNGK |
| | | (1-472)(Q46(38)E, | SVFIFPPSDEQLKSGTA | EYKCKVSNKALPAPIEKTISKAKGQPREPQVYTLPPSRKEMTKNQVS |
| | | S73(85)A,G65(77)A) | SVVCLLNNFYPREAKV | LTCLVKGFYPSDIAVEWESNGQPENNYKTTPPVLKSDGSFFLYSKLT |
| | | VH]:: huIgG1z-SEFL2- | QWKVDNALQSGNSQE | VDKSRWQQGNVFSCSVMHEALHNHYTQKSLSLSPGK (SEQ ID NO: |
| | | EKK + gila | SVTEQDSKDSTYSLKS | 3744) |
| | | monsterExendin-4 | TLTLSKADYEKHKVY | |
| | | (1-22)(E3D):: | ACEVTHQGLSSPVTKS | |
| | | 1AQ1K(modV,GS):: [hu | FNRGEC (SEQ ID NO: | |
| | | anti-<huGLP-1R> | 3453) | |
| | | 3E6 (C105Y, Q46E) | | |
| | | VL]:: huKLC-S176E + | | |
| | | [hu anti-<huGLP-1R> | | |
| | | 3E6.1 (Q46(39)K) | | |
| | | VH]:: huIgG1z-SEFL2- | | |
| | | KDD (Hetero-Ig) | | |
| PL- | iPS: | [hu anti-<huGIPR> | EIVMTQSPATLSVSPGE | QVQLVESGGGVVQPGRSLRLSCAASGFTFSNYGMHWVREAPGEGL |
| 46650 | 424491 | 21-143_2G10_LC1 | RATLSCRASQSVSSNL | EWVAAIWFDASDKYYADAVKGRFTISRDNSKNTLYLQMNSLRAED |
| | | VK3 (1-236)(Q46(38)K) | AWYQKKPGQAPRLLIY | TAVYYCARDQAIFGVVPDYWGQGTLVTVSSASTKGPSVFPLAPSSK |
| | | VL]:: huKLC- | GAATRATGIPARVSGS | STSGGTAALGCLVKDYFPEPVTVSWNSGALTSGVHTFPAVLQSSGL |
| | | S176K + [hu anti- | GSGTEFTLTISSLQSED | YSLESVVTVPSSSLGTQTYICNVNHKPSNTKVDKKVEPKSCDKTHT |
| | | <huGIPR> 21- | FAVYYCQQYNNWPLT | CPPCPAPELLGGPSVFLFPPKPKDTLMISRTPEVTCVVVDVSHEDPEV |
| | | 143_2G10_LC1.003 VH3 | FGGGTKVEIKRTVAAP | KFNWYVDGVEVHNAKTKPCEEQYGSTYRCVSVLTVLHQDWLNGK |
| | | (1-472)(Q46(38)E, | SVFIFPPSDEQLKSGTA | EYKCKVSNKALPAPIEKTISKAKGQPREPQVYTLPPSRKEMTKNQVS |
| | | S73(85)A,G65(77)A) | SVVCLLNNFYPREAKV | LTCLVKGFYPSDIAVEWESNGQPENNYKTTPPVLKSDGSFFLYSKLT |
| | | VH]:: huIgG1z-SEFL2- | QWKVDNALQSGNSQE | VDKSRWQQGNVFSCSVMHEALHNHYTQKSLSLSPGK (SEQ ID NO: |
| | | EKK + gila | SVTEQDSKDSTYSLKS | 3745) |
| | | monsterExendin-4 | TLTLSKADYEKHKVY | |
| | | (1-22)(G2S,E3D):: | ACEVTHQGLSSPVTKS | |
| | | 1AQ1K(modV,GS):: [hu | FNRGEC (SEQ ID NO: | |
| | | anti-<huGLP-1R> | 3454) | |
| | | 3E6 (C105Y, Q46E) | | |
| | | VL]:: huKLC-S176E + | | |
| | | [hu anti-<huGLP-1R> | | |
| | | 3E6.1 (Q46(39)K) | | |
| | | VH]:: huIgG1z-SEFL2- | | |
| | | KDD (Hetero-Ig) | | |
| PL- | iPS: | [hu anti-<huGIPR> | EIVMTQSPATLSVSPGE | QVQLVESGGGVVQPGRSLRLSCAASGFTFSNYGMHWVREAPGEGL |
| 46651 | 424492 | 21-143_2G10_LC1 | RATLSCRASQSVSSNL | EWVAAIWFDASDKYYADAVKGRFTISRDNSKNTLYLQMNSLRAED |
| | | VK3 (1-236)(Q46(38)K) | AWYQKKPGQAPRLLIY | TAVYYCARDQAIFGVVPDYWGQGTLVTVSSASTKGPSVFPLAPSSK |
| | | VL]:: huKLC- | GAATRATGIPARVSGS | STSGGTAALGCLVKDYFPEPVTVSWNSGALTSGVHTFPAVLQSSGL |
| | | S176K + [hu anti- | GSGTEFTLTISSLQSED | YSLESVVTVPSSSLGTQTYICNVNHKPSNTKVDKKVEPKSCDKTHT |
| | | <huGIPR> 21- | FAVYYCQQYNNWPLT | CPPCPAPELLGGPSVFLFPPKPKDTLMISRTPEVTCVVVDVSHEDPEV |
| | | 143_2G10_LC1.003 VH3 | FGGGTKVEIKRTVAAP | KFNWYVDGVEVHNAKTKPCEEQYGSTYRCVSVLTVLHQDWLNGK |
| | | (1-472)(Q46(38)E, | SVFIFPPSDEQLKSGTA | EYKCKVSNKALPAPIEKTISKAKGQPREPQVYTLPPSRKEMTKNQVS |
| | | S73(85)A, G65(77)A) | SVVCLLNNFYPREAKV | LTCLVKGFYPSDIAVEWESNGQPENNYKTTPPVLKSDGSFFLYSKLT |
| | | VH]:: huIgG1z-SEFL2- | QWKVDNALQSGNSQE | VDKSRWQQGNVFSCSVMHEALHNHYTQKSLSLSPGK (SEQ ID NO: |
| | | EKK + gila | SVTEQDSKDSTYSLKS | 3746) |
| | | monsterExendin-4 | TLTLSKADYEKHKVY | |
| | | (1-22)(G2S):: | ACEVTHQGLSSPVTKS | |
| | | 1AQ1K(modV,GS):: [hu | FNRGEC (SEQ ID NO: | |
| | | anti-<huGLP-1R> | 3455) | |
| | | 3E6 (C105S, Q46E) | | |
| | | VL]:: huKLC-S176E + | | |
| | | [hu anti-<huGLP-1R> | | |
| | | 3E6.1 (Q46(39)K) | | |
| | | VH]:: huIgG1z-SEFL2- | | |
| | | KDD (Hetero-Ig) | | |
| PL- | iPS: | [hu anti-<huGIPR> | EIVMTQSPATLSVSPGE | QVQLVESGGGVVQPGRSLRLSCAASGFTFSNYGMHWVREAPGEGL |
| 46652 | 424493 | 21-143 2G10 LC1 | RATLSCRASQSVSSNL | EWVAAIWFDASDKYYADAVKGRFTISRDNSKNTLYLQMNSLRAED |
| | | VK3 (1-236)(Q46(38)K) | AWYQKKPGQAPRLLIY | TAVYYCARDQAIFGVVPDYWGQGTLVTVSSASTKGPSVFPLAPSSK |
| | | VL]:: huKLC- | GAATRATGIPARVSGS | STSGGTAALGCLVKDYFPEPVTVSWNSGALTSGVHTFPAVLQSSGL |
| | | S176K + [hu anti- | GSGTEFTLTISSLQSED | YSLESVVTVPSSSLGTQTYICNVNHKPSNTKVDKKVEPKSCDKTHT |
| | | <huGIPR> 21- | FAVYYCQQYNNWPLT | CPPCPAPELLGGPSVFLFPPKPKDTLMISRTPEVTCVVVDVSHEDPEV |
| | | 143_2G10_LC1.003 VH3 | FGGGTKVEIKRTVAAP | KFNWYVDGVEVHNAKTKPCEEQYGSTYRCVSVLTVLHQDWLNGK |
| | | (1-472)(Q46(38)E, | SVFIFPPSDEQLKSGTA | EYKCKVSNKALPAPIEKTISKAKGQPREPQVYTLPPSRKEMTKNQVS |
| | | S73(85)A, G65(77)A) | SVVCLLNNFYPREAKV | LTCLVKGFYPSDIAVEWESNGQPENNYKTTPPVLKSDGSFFLYSKLT |
| | | VH]:: huIgG1z-SEFL2- | QWKVDNALQSGNSQE | VDKSRWQQGNVFSCSVMHEALHNHYTQKSLSLSPGK (SEQ ID NO: |
| | | EKK + gila | SVTEQDSKDSTYSLKS | 3747) |
| | | monsterExendin-4 | TLTLSKADYEKHKVY | |
| | | (1-22)(G2S,E3Q):: | ACEVTHQGLSSPVTKS | |
| | | 1AQ1K(modV,GS):: [hu | FNRGEC (SEQ ID NO: | |
| | | anti-<huGLP-1R> | 3456) | |
| | | 3E6 (C105S, Q46E) | | |
| | | VL]:: huKLC-S176E + | | |
| | | [hu anti-<huGLP-1R> | | |
| | | 3E6.1 (Q46(39)K) | | |
| | | VH]:: huIgG1z-SEFL2- | | |
| | | KDD (Hetero-Ig) | | |
| PL- | iPS: | [hu anti-<huGIPR> | EIVMTQSPATLSVSPGE | QVQLVESGGGVVQPGRSLRLSCAASGFTFSNYGMHWVREAPGEGL |
| 46653 | 424494 | 21-143 2G10 LC1 | RATLSCRASQSVSSNL | EWVAAIWFDASDKYYADAVKGRFTISRDNSKNTLYLQMNSLRAED |
| | | VK3 (1-236)(Q46(38)K) | AWYQKKPGQAPRLLIY | TAVYYCARDQAIFGVVPDYWGQGTLVTVSSASTKGPSVFPLAPSSK |
| | | VL]:: huKLC- | GAATRATGIPARVSGS | STSGGTAALGCLVKDYFPEPVTVSWNSGALTSGVHTFPAVLQSSGL |
| | | S176K + [hu anti- | GSGTEFTLTISSLQSED | YSLESVVTVPSSSLGTQTYICNVNHKPSNTKVDKKVEPKSCDKTHT |
| | | <huGIPR> 21- | FAVYYCQQYNNWPLT | CPPCPAPELLGGPSVFLFPPKPKDTLMISRTPEVTCVVVDVSHEDPEV |
| | | 143_2G10_LC1.003 VH3 | FGGGTKVEIKRTVAAP | KFNWYVDGVEVHNAKTKPCEEQYGSTYRCVSVLTVLHQDWLNGK |
| | | (1-472)(Q46(38)E, | SVFIFPPSDEQLKSGTA | EYKCKVSNKALPAPIEKTISKAKGQPREPQVYTLPPSRKEMTKNQVS |
| | | S73(85)A,G65(77)A) | SVVCLLNNFYPREAKV | LTCLVKGFYPSDIAVEWESNGQPENNYKTTPPVLKSDGSFFLYSKLT |
| | | VH]:: huIgG1z-SEFL2- | QWKVDNALQSGNSQE | VDKSRWQQGNVFSCSVMHEALHNHYTQKSLSLSPGK (SEQ ID NO: |
| | | EKK + gila | SVTEQDSKDSTYSLKS | 3748) |
| | | monsterExendin-4 | TLTLSKADYEKHKVY | |
| | | (1-22)(E3D):: | ACEVTHQGLSSPVTKS | |
| | | 1AQ1K(modV,GS):: [hu | FNRGEC (SEQ ID NO: | |
| | | anti-<huGLP-1R> | 3457) | |
| | | 3E6 (C105S, Q46E) | | |
| | | VL]:: huKLC-S176E + | | |
| | | [hu anti-<huGLP-1R> | | |
| | | 3E6.1 (Q46(39)K) | | |
| | | VH]:: huIgG1z-SEFL2- | | |
| | | KDD (Hetero-Ig) | | |
| PL- | iPS: | [hu anti-<huGIPR> | EIVMTQSPATLSVSPGE | QVQLVESGGGVVQPGRSLRLSCAASGFTFSNYGMHWVREAPGEGL |
| 46654 | 424495 | 21-143_2G10 LC1 | RATLSCRASQSVSSNL | EWVAAIWFDASDKYYADAVKGRFTISRDNSKNTLYLQMNSLRAED |
| | | VK3 (1-236)(Q46(38)K) | AWYQKKPGQAPRLLIY | TAVYYCARDQAIFGVVPDYWGQGTLVTVSSASTKGPSVFPLAPSSK |
| | | VL]:: huKLC- | GAATRATGIPARVSGS | STSGGTAALGCLVKDYFPEPVTVSWNSGALTSGVHTFPAVLQSSGL |
| | | S176K + [hu anti- | GSGTEFTLTISSLQSED | YSLESVVTVPSSSLGTQTYICNVNHKPSNTKVDKKVEPKSCDKTHT |
| | | <huGIPR> 21- | FAVYYCQQYNNWPLT | CPPCPAPELLGGPSVFLFPPKPKDTLMISRTPEVTCVVVDVSHEDPEV |
| | | 143_2G10_LC1.003 VH3 | FGGGTKVEIKRTVAAP | KFNWYVDGVEVHNAKTKPCEEQYGSTYRCVSVLTVLHQDWLNGK |
| | | (1-472)(Q46(38)E, | SVFIFPPSDEQLKSGTA | EYKCKVSNKALPAPIEKTISKAKGQPREPQVYTLPPSRKEMTKNQVS |
| | | S73(85)A, G65(77)A) | SVVCLLNNFYPREAKV | LTCLVKGFYPSDIAVEWESNGQPENNYKTTPPVLKSDGSFFLYSKLT |
| | | VH]:: huIgG1z-SEFL2- | QWKVDNALQSGNSQE | VDKSRWQQGNVFSCSVMHEALHNHYTQKSLSLSPGK (SEQ ID NO: |
| | | EKK + gila | SVTEQDSKDSTYSLKS | 3749) |
| | | monsterExendin-4 | TLTLSKADYEKHKVY | |
| | | (1-22)(G2S,E3D):: | ACEVTHQGLSSPVTKS | |
| | | 1AQ1K(modV,GS):: [hu | FNRGEC (SEQ ID NO: | |
| | | anti-<huGLP-1R> | 3458) | |
| | | 3E6 (C105S, Q46E) | | |
| | | VL]:: huKLC-S176E + | | |
| | | [hu anti-<huGLP-1R> | | |
| | | 3E6.1 (Q46(39)K) | | |
| | | VH]:: huIgG1z-SEFL2- | | |
| | | KDD (Hetero-Ig) | | |
| PL- | iPS: | [hu anti-<huGIPR> | EIVMTQSPATLSVSPGE | QVQLVESGGGVVQPGRSLRLSCAASGFTFSNYGMHWVRQAPGEEL |
| 46655 | 424496 | 21-143_2G10_LC1 | RATLSCRASQSVSSNL | EWVAAIWFDASDKYYADAVKGRFTISRDNSKNTLYLQMNSLRAED |
| | | VK3 (1-236) | AWYQQKPGQAPRLLIY | TAVYYCARDQAIFGVVPDYWGQGTLVTVSSASTKGPSVFPLAPSSK |
| | | (P141(100)K) | GAATRATGIPARVSGS | STSGGTAALGCLVKDYFPEPVTVSWNSGALTSGVHTFPAVLQSSGL |
| | | VL]:: huKLC-S176K + | GSGTEFTLTISSLQSED | YSLESVVTVPSSSLGTQTYICNVNHKPSNTKVDKKVEPKSCDKTHT |
| | | [hu anti-<huGIPR> | FAVYYCQQYNNWPLT | CPPCPAPELLGGPSVFLFPPKPKDTLMISRTPEVTCVVVDVSHEDPEV |
| | | 21-143_2G10_LC1.003 | FGKGTKVEIKRTVAAP | KFNWYVDGVEVHNAKTKPCEEQYGSTYRCVSVLTVLHQDWLNGK |
| | | VH3 (1-472)(G51(44)E, | SVFIFPPSDEQLKSGTA | EYKCKVSNKALPAPIEKTISKAKGQPREPQVYTLPPSRKEMTKNQVS |
| | | S73(85)A,G65(77)A) | SVVCLLNNFYPREAKV | LTCLVKGFYPSDIAVEWESNGQPENNYKTTPPVLKSDGSFFLYSKLT |
| | | VH]:: huIgG1z- | QWKVDNALQSGNSQE | VDKSRWQQGNVFSCSVMHEALHNHYTQKSLSLSPGK (SEQ ID NO: |
| | | SEFL2-EKK + gila | SVTEQDSKDSTYSLKS | 3750) |
| | | monsterExendin- | TLTLSKADYEKHKVY | |
| | | 4(1-22):: | ACEVTHQGLSSPVTKS | |
| | | 1AQ1K(modV,GS):: [hu | FNRGEC (SEQ ID NO: | |
| | | anti-<huGLP-1R> | 3459) | |
| | | 3E6 (Q141(174)E) | | |
| | | VL]:: huKLC-S176E + | | |
| | | [hu anti-<huGLP-1R> | | |
| | | 3E6.1 (G51(44)K) | | |
| | | VH]:: huIgG1z-SEFL2- | | |
| | | KDD (Hetero-Ig) | | |
| PL- | iPS: | [hu anti-<huGIPR> | EIVMTQSPATLSVSPGE | QVQLVESGGGVVQPGRSLRLSCAASGFTFSNYGMHWVRQAPGEEL |
| 46656 | 424497 | 21-143_2G10_LC1 | RATLSCRASQSVSSNL | EWVAAIWFDASDKYYADAVKGRFTISRDNSKNTLYLQMNSLRAED |
| | | VK3(1-236) | AWYQQKPGQAPRLLIY | TAVYYCARDQAIFGVVPDYWGQGTLVTVSSASTKGPSVFPLAPSSK |
| | | (P141(100)K) | GAATRATGIPARVSGS | STSGGTAALGCLVKDYFPEPVTVSWNSGALTSGVHTFPAVLQSSGL |
| | | VL]:: huKLC-S176K + | GSGTEFTLTISSLQSED | YSLESVVTVPSSSLGTQTYICNVNHKPSNTKVDKKVEPKSCDKTHT |
| | | [hu anti-<huGIPR> | FAVYYCQQYNNWPLT | CPPCPAPELLGGPSVFLFPPKPKDTLMISRTPEVTCVVVDVSHEDPEV |
| | | 21-143_2G10_LC1.003 | FGKGTKVEIKRTVAAP | KFNWYVDGVEVHNAKTKPCEEQYGSTYRCVSVLTVLHQDWLNGK |
| | | VH3 (1-472)(G51(44)E, | SVFIFPPSDEQLKSGTA | EYKCKVSNKALPAPIEKTISKAKGQPREPQVYTLPPSRKEMTKNQVS |
| | | S73(85)A, G65(77)A) | SVVCLLNNFYPREAKV | LTCLVKGFYPSDIAVEWESNGQPENNYKTTPPVLKSDGSFFLYSKLT |
| | | VH]:: huIgG1z- | QWKVDNALQSGNSQE | VDKSRWQQGNVFSCSVMHEALHNHYTQKSLSLSPGK (SEQ ID NO: |
| | | SEFL2-EKK + gila | SVTEQDSKDSTYSLKS | 3751) |
| | | monsterExendin- | TLTLSKADYEKHKVY | |
| | | 4(1-22):: | ACEVTHQGLSSPVTKS | |
| | | 1AQ1K(modV,GS):: [hu | FNRGEC (SEQ ID NO: | |
| | | anti-<huGLP-1R> | 3460) | |
| | | 3E6 (C105Y, | | |
| | | Q141(174)E) VL]:: | | |
| | | huKLC-S176E + [hu | | |
| | | anti-<huGLP-1R> | | |
| | | 3E6.1 (G51(44)K) | | |
| | | VH]:: huIgG1z-SEFL2- | | |
| | | KDD (Hetero-Ig) | | |
| PL- | iPS: | [hu anti-<huGIPR> | EIVMTQSPATLSVSPGE | QVQLVESGGGVVQPGRSLRLSCAASGFTFSNYGMHWVRQAPGEEL |
| 46657 | 424498 | 21-143_2G10_LC1 | RATLSCRASQSVSSNL | EWVAAIWFDASDKYYADAVKGRFTISRDNSKNTLYLQMNSLRAED |
| | | VK3 (1-236) | AWYQQKPGQAPRLLIY | TAVYYCARDQAIFGVVPDYWGQGTLVTVSSASTKGPSVFPLAPSSK |
| | | (P141(100)K) | GAATRATGIPARVSGS | STSGGTAALGCLVKDYFPEPVTVSWNSGALTSGVHTFPAVLQSSGL |
| | | VL]:: huKLC-S176K + | GSGTEFTLTISSLQSED | YSLESVVTVPSSSLGTQTYICNVNHKPSNTKVDKKVEPKSCDKTHT |
| | | [hu anti-<huGIPR> | FAVYYCQQYNNWPLT | CPPCPAPELLGGPSVFLFPPKPKDTLMISRTPEVTCVVVDVSHEDPEV |
| | | 21-143_2G10_LC1.003 | FGKGTKVEIKRTVAAP | KFNWYVDGVEVHNAKTKPCEEQYGSTYRCVSVLTVLHQDWLNGK |
| | | VH3 (1-472)(G51(44)E, | SVFIFPPSDEQLKSGTA | EYKCKVSNKALPAPIEKTISKAKGQPREPQVYTLPPSRKEMTKNQVS |
| | | S73(85)A, G65(77)A) | SVVCLLNNFYPREAKV | LTCLVKGFYPSDIAVEWESNGQPENNYKTTPPVLKSDGSFFLYSKLT |
| | | VH]:: huIgG1z- | QWKVDNALQSGNSQE | VDKSRWQQGNVFSCSVMHEALHNHYTQKSLSLSPGK (SEQ ID NO: |
| | | SEFL2-EKK + gila | SVTEQDSKDSTYSLKS | 3752) |
| | | monsterExendin- | TLTLSKADYEKHKVY | |
| | | 4(1-22):: | ACEVTHQGLSSPVTKS | |
| | | 1AQ1K(modV,GS):: [hu | FNRGEC (SEQ ID NO: | |
| | | anti-<huGLP-1R> | 3461) | |
| | | 3E6 (C105S, | | |
| | | Q141(174)E) VL]:: | | |
| | | huKLC-S176E + [hu | | |
| | | anti-<huGLP-1R> | | |
| | | 3E6.1 (G51(44)K) | | |
| | | VH]:: huIgG1z-SEFL2- | | |
| | | KDD (Hetero-Ig) | | |
| PL- | iPS: | [hu anti-<huGIPR> | EIVMTQSPATLSVSPGE | QVQLVESGGGVVQPGRSLRLSCAASGFTFSNYGMHWVRQAPGEEL |
| 46658 | 424499 | 21-143_2G10 LC1 | RATLSCRASQSVSSNL | EWVAAIWFDASDKYYADAVKGRFTISRDNSKNTLYLQMNSLRAED |
| | | VK3(1-236) | AWYQQKPGQAPRLLIY | TAVYYCARDQAIFGVVPDYWGQGTLVTVSSASTKGPSVFPLAPSSK |
| | | (P141(100)K) | GAATRATGIPARVSGS | STSGGTAALGCLVKDYFPEPVTVSWNSGALTSGVHTFPAVLQSSGL |
| | | VL]:: huKLC-S176K + | GSGTEFTLTISSLQSED | YSLESVVTVPSSSLGTQTYICNVNHKPSNTKVDKKVEPKSCDKTHT |
| | | [hu anti-<huGIPR> | FAVYYCQQYNNWPLT | CPPCPAPELLGGPSVFLFPPKPKDTLMISRTPEVTCVVVDVSHEDPEV |
| | | 21-143_2G10_LC1.003 | FGKGTKVEIKRTVAAP | KFNWYVDGVEVHNAKTKPCEEQYGSTYRCVSVLTVLHQDWLNGK |
| | | VH3 (1-472)(G51(44)E, | SVFIFPPSDEQLKSGTA | EYKCKVSNKALPAPIEKTISKAKGQPREPQVYTLPPSRKEMTKNQVS |
| | | S73(85)A,G65(77)A) | SVVCLLNNFYPREAKV | LTCLVKGFYPSDIAVEWESNGQPENNYKTTPPVLKSDGSFFLYSKLT |
| | | VH]:: huIgG1z- | QWKVDNALQSGNSQE | VDKSRWQQGNVFSCSVMHEALHNHYTQKSLSLSPGK (SEQ ID NO: |
| | | SEFL2-EKK + gila | SVTEQDSKDSTYSLKS | 3753) |
| | | monsterExendin- | TLTLSKADYEKHKVY | |
| | | 4(1-22)(G2S):: | ACEVTHQGLSSPVTKS | |
| | | 1AQ1K(modV,GS):: [hu | FNRGEC (SEQ ID NO: | |
| | | anti-<huGLP-1R> | 3462) | |
| | | 3E6 (C105Y, | | |
| | | Q141E) VL]:: | | |
| | | huKLC-S176E + [hu | | |
| | | anti-<huGLP-1R> | | |
| | | 3E6.1 (G51(44)K) | | |
| | | VH]:: huIgG1z-SEFL2- | | |
| | | KDD (Hetero-Ig) | | |
| PL- | iPS: | [hu anti-<huGIPR> | EIVMTQSPATLSVSPGE | QVQLVESGGGVVQPGRSLRLSCAASGFTFSNYGMHWVRQAPGEEL |
| 46659 | 424500 | 21-143_2G10_LC1 | RATLSCRASQSVSSNL | EWVAAIWFDASDKYYADAVKGRFTISRDNSKNTLYLQMNSLRAED |
| | | VK3 (1-236) | AWYQQKPGQAPRLLIY | TAVYYCARDQAIFGVVPDYWGQGTLVTVSSASTKGPSVFPLAPSSK |
| | | (P141(100)K) | GAATRATGIPARVSGS | STSGGTAALGCLVKDYFPEPVTVSWNSGALTSGVHTFPAVLQSSGL |
| | | VL]:: huKLC-S176K + | GSGTEFTLTISSLQSED | YSLESVVTVPSSSLGTQTYICNVNHKPSNTKVDKKVEPKSCDKTHT |
| | | [hu anti-<huGIPR> | FAVYYCQQYNNWPLT | CPPCPAPELLGGPSVFLFPPKPKDTLMISRTPEVTCVVVDVSHEDPEV |
| | | 21-143_2G10_LC1.003 | FGKGTKVEIKRTVAAP | KFNWYVDGVEVHNAKTKPCEEQYGSTYRCVSVLTVLHQDWLNGK |
| | | VH3 (1-472)(G51(44)E, | SVFIFPPSDEQLKSGTA | EYKCKVSNKALPAPIEKTISKAKGQPREPQVYTLPPSRKEMTKNQVS |
| | | S73(85)A, G65(77)A) | SVVCLLNNFYPREAKV | LTCLVKGFYPSDIAVEWESNGQPENNYKTTPPVLKSDGSFFLYSKLT |
| | | VH]:: huIgG1z- | QWKVDNALQSGNSQE | VDKSRWQQGNVFSCSVMHEALHNHYTQKSLSLSPGK (SEQ ID NO: |
| | | SEFL2-EKK + gila | SVTEQDSKDSTYSLKS | 3754) |
| | | monsterExendin- | TLTLSKADYEKHKVY | |
| | | 4(1-22)(G2S,E3Q):: | ACEVTHQGLSSPVTKS | |
| | | 1AQ1K(modV,GS):: [hu | FNRGEC (SEQ ID NO: | |
| | | anti-<huGLP-1R> | 3463) | |
| | | 3E6 (C105Y, Q141E) | | |
| | | VL]:: huKLC-S176E + | | |
| | | [hu anti-<huGLP-1R> | | |
| | | 3E6.1 (G51(44)K) | | |
| | | VH]:: huIgG1z-SEFL2- | | |
| | | KDD (Hetero-Ig) | | |
| PL- | iPS: | [hu anti-<huGIPR> | EIVMTQSPATLSVSPGE | QVQLVESGGGVVQPGRSLRLSCAASGFTFSNYGMHWVRQAPGEEL |
| 46660 | 424501 | 21-143_2G10_LC1 | RATLSCRASQSVSSNL | EWVAAIWFDASDKYYADAVKGRFTISRDNSKNTLYLQMNSLRAED |
| | | VK3 (1-236) | AWYQQKPGQAPRLLIY | TAVYYCARDQAIFGVVPDYWGQGTLVTVSSASTKGPSVFPLAPSSK |
| | | (P141(100)K) | GAATRATGIPARVSGS | STSGGTAALGCLVKDYFPEPVTVSWNSGALTSGVHTFPAVLQSSGL |
| | | VL]:: huKLC-S176K + | GSGTEFTLTISSLQSED | YSLESVVTVPSSSLGTQTYICNVNHKPSNTKVDKKVEPKSCDKTHT |
| | | [hu anti-<huGIPR> | FAVYYCQQYNNWPLT | CPPCPAPELLGGPSVFLFPPKPKDTLMISRTPEVTCVVVDVSHEDPEV |
| | | 21-143_2G10_LC1.003 | FGKGTKVEIKRTVAAP | KFNWYVDGVEVHNAKTKPCEEQYGSTYRCVSVLTVLHQDWLNGK |
| | | VH3 (1-472)(G51(44)E, | SVFIFPPSDEQLKSGTA | EYKCKVSNKALPAPIEKTISKAKGQPREPQVYTLPPSRKEMTKNQVS |
| | | S73(85)A,G65(77)A) | SVVCLLNNFYPREAKV | LTCLVKGFYPSDIAVEWESNGQPENNYKTTPPVLKSDGSFFLYSKLT |
| | | VH]:: huIgG1z- | QWKVDNALQSGNSQE | VDKSRWQQGNVFSCSVMHEALHNHYTQKSLSLSPGK (SEQ ID NO: |
| | | SEFL2-EKK + gila | SVTEQDSKDSTYSLKS | 3755) |
| | | monsterExendin- | TLTLSKADYEKHKVY | |
| | | 4(1-22)(E3D):: | ACEVTHQGLSSPVTKS | |
| | | 1AQ1K(modV,GS):: [hu | FNRGEC (SEQ ID NO: | |
| | | anti-<huGLP-1R> | 3464) | |
| | | 3E6 (C105Y, | | |
| | | Q141E) VL]:: huKLC- | | |
| | | S176E + [hu anti- | | |
| | | <huGLP-1R> 3E6.1 | | |
| | | (G51(44)K) | | |
| | | VH]:: huIgG1z-SEFL2- | | |
| | | KDD (Hetero-Ig) | | |
| PL- | iPS: | [hu anti-<huGIPR> | EIVMTQSPATLSVSPGE | QVQLVESGGGVVQPGRSLRLSCAASGFTFSNYGMHWVRQAPGEEL |
| 46661 | 424502 | 21-143_2G10 LC1 | RATLSCRASQSVSSNL | EWVAAIWFDASDKYYADAVKGRFTISRDNSKNTLYLQMNSLRAED |
| | | VK3 (1-236) | AWYQQKPGQAPRLLIY | TAVYYCARDQAIFGVVPDYWGQGTLVTVSSASTKGPSVFPLAPSSK |
| | | (P141(100)K) | GAATRATGIPARVSGS | STSGGTAALGCLVKDYFPEPVTVSWNSGALTSGVHTFPAVLQSSGL |
| | | VL]:: huKLC-S176K + | GSGTEFTLTISSLQSED | YSLESVVTVPSSSLGTQTYICNVNHKPSNTKVDKKVEPKSCDKTHT |
| | | [hu anti-<huGIPR> | FAVYYCQQYNNWPLT | CPPCPAPELLGGPSVFLFPPKPKDTLMISRTPEVTCVVVDVSHEDPEV |
| | | 21-143_2G10_LC1.003 | FGKGTKVEIKRTVAAP | KFNWYVDGVEVHNAKTKPCEEQYGSTYRCVSVLTVLHQDWLNGK |
| | | VH3 (1-472)(G51(44)E, | SVFIFPPSDEQLKSGTA | EYKCKVSNKALPAPIEKTISKAKGQPREPQVYTLPPSRKEMTKNQVS |
| | | S73(85)A, G65(77)A) | SVVCLLNNFYPREAKV | LTCLVKGFYPSDIAVEWESNGQPENNYKTTPPVLKSDGSFFLYSKLT |
| | | VH]:: huIgG1z- | QWKVDNALQSGNSQE | VDKSRWQQGNVFSCSVMHEALHNHYTQKSLSLSPGK (SEQ ID NO: |
| | | SEFL2-EKK + gila | SVTEQDSKDSTYSLKS | 3756) |
| | | monsterExendin- | TLTLSKADYEKHKVY | |
| | | 4(1-22)(G2S,E3D):: | ACEVTHQGLSSPVTKS | |
| | | 1AQ1K(modV,GS):: [hu | FNRGEC (SEQ ID NO: | |
| | | anti-<huGLP-1R> | 3465) | |
| | | 3E6 (C105Y, Q141E) | | |
| | | VL]:: huKLC-S176E + | | |
| | | [hu anti-<huGLP-1R> | | |
| | | 3E6.1 (G51(44)K) | | |
| | | VH]:: huIgG1z-SEFL2- | | |
| | | KDD (Hetero-Ig) | | |
| PL- | iPS: | [hu anti-<huGIPR> | EIVMTQSPATLSVSPGE | QVQLVESGGGVVQPGRSLRLSCAASGFTFSNYGMHWVRQAPGEEL |
| 46662 | 424503 | 21-143_2G10_LC1 | RATLSCRASQSVSSNL | EWVAAIWFDASDKYYADAVKGRFTISRDNSKNTLYLQMNSLRAED |
| | | VK3 (1-236) | AWYQQKPGQAPRLLIY | TAVYYCARDQAIFGVVPDYWGQGTLVTVSSASTKGPSVFPLAPSSK |
| | | (P141(100)K) | GAATRATGIPARVSGS | STSGGTAALGCLVKDYFPEPVTVSWNSGALTSGVHTFPAVLQSSGL |
| | | VL]:: huKLC-S176K + | GSGTEFTLTISSLQSED | YSLESVVTVPSSSLGTQTYICNVNHKPSNTKVDKKVEPKSCDKTHT |
| | | [hu anti-<huGIPR> | FAVYYCQQYNNWPLT | CPPCPAPELLGGPSVFLFPPKPKDTLMISRTPEVTCVVVDVSHEDPEV |
| | | 21-143_2G10_LC1.003 | FGKGTKVEIKRTVAAP | KFNWYVDGVEVHNAKTKPCEEQYGSTYRCVSVLTVLHQDWLNGK |
| | | VH3 (1-472)(G51(44)E, | SVFIFPPSDEQLKSGTA | EYKCKVSNKALPAPIEKTISKAKGQPREPQVYTLPPSRKEMTKNQVS |
| | | S73(85)A,G65(77)A) | SVVCLLNNFYPREAKV | LTCLVKGFYPSDIAVEWESNGQPENNYKTTPPVLKSDGSFFLYSKLT |
| | | VH]:: huIgG1z- | QWKVDNALQSGNSQE | VDKSRWQQGNVFSCSVMHEALHNHYTQKSLSLSPGK (SEQ ID NO: |
| | | SEFL2-EKK + gila | SVTEQDSKDSTYSLKS | 3757) |
| | | monsterExendin- | TLTLSKADYEKHKVY | |
| | | 4(1-22)(G2S):: | ACEVTHQGLSSPVTKS | |
| | | 1AQ1K(modV,GS):: [hu | FNRGEC (SEQ ID NO: | |
| | | anti-<huGLP-1R> | 3466) | |
| | | 3E6 (C105S, Q141E) | | |
| | | VL]:: huKLC-S176E + | | |
| | | [hu anti-<huGLP-1R> | | |
| | | 3E6.1(G51(44)K) | | |
| | | VH]:: huIgG1z-SEFL2- | | |
| | | KDD (Hetero-Ig) | | |
| PL- | iPS: | [hu anti-<huGIPR> | EIVMTQSPATLSVSPGE | QVQLVESGGGVVQPGRSLRLSCAASGFTFSNYGMHWVRQAPGEEL |
| 46663 | 424504 | 21-143_2G10_LC1 | RATLSCRASQSVSSNL | EWVAAIWFDASDKYYADAVKGRFTISRDNSKNTLYLQMNSLRAED |
| | | VK3 (1-236) | AWYQQKPGQAPRLLIY | TAVYYCARDQAIFGVVPDYWGQGTLVTVSSASTKGPSVFPLAPSSK |
| | | (P141(100)K) | GAATRATGIPARVSGS | STSGGTAALGCLVKDYFPEPVTVSWNSGALTSGVHTFPAVLQSSGL |
| | | VL]:: huKLC-S176K + | GSGTEFTLTISSLQSED | YSLESVVTVPSSSLGTQTYICNVNHKPSNTKVDKKVEPKSCDKTHT |
| | | [hu anti-<huGIPR> | FAVYYCQQYNNWPLT | CPPCPAPELLGGPSVFLFPPKPKDTLMISRTPEVTCVVVDVSHEDPEV |
| | | 21-143_2G10_LC1.003 | FGKGTKVEIKRTVAAP | KFNWYVDGVEVHNAKTKPCEEQYGSTYRCVSVLTVLHQDWLNGK |
| | | VH3 (1-472)(G51(44)E, | SVFIFPPSDEQLKSGTA | EYKCKVSNKALPAPIEKTISKAKGQPREPQVYTLPPSRKEMTKNQVS |
| | | S73(85)A, G65(77)A) | SVVCLLNNFYPREAKV | LTCLVKGFYPSDIAVEWESNGQPENNYKTTPPVLKSDGSFFLYSKLT |
| | | VH]:: huIgG1z- | QWKVDNALQSGNSQE | VDKSRWQQGNVFSCSVMHEALHNHYTQKSLSLSPGK (SEQ ID NO: |
| | | SEFL2-EKK + gila | SVTEQDSKDSTYSLKS | 3758) |
| | | monsterExendin- | TLTLSKADYEKHKVY | |
| | | 4(1-22)(G2S,E3Q):: | ACEVTHQGLSSPVTKS | |
| | | 1AQ1K(modV,GS):: | FNRGEC (SEQ ID NO: | |
| | | [hu anti-<huGLP-1R> | 3467) | |
| | | 3E6 (C105S, Q141E) | | |
| | | VL]:: huKLC-S176E + | | |
| | | [hu anti-<huGLP-1R> | | |
| | | 3E6.1 (G51(44)K) | | |
| | | VH]:: huIgG1z-SEFL2- | | |
| | | KDD (Hetero-Ig) | | |
| PL- | iPS: | [hu anti-<huGIPR> | EIVMTQSPATLSVSPGE | QVQLVESGGGVVQPGRSLRLSCAASGFTFSNYGMHWVRQAPGEEL |
| 46664 | 424505 | 21-143 2G10 LC1 | RATLSCRASQSVSSNL | EWVAAIWFDASDKYYADAVKGRFTISRDNSKNTLYLQMNSLRAED |
| | | VK3 (1-236) | AWYQQKPGQAPRLLIY | TAVYYCARDQAIFGVVPDYWGQGTLVTVSSASTKGPSVFPLAPSSK |
| | | (P141(100)K) | GAATRATGIPARVSGS | STSGGTAALGCLVKDYFPEPVTVSWNSGALTSGVHTFPAVLQSSGL |
| | | VL]:: huKLC-S176K + | GSGTEFTLTISSLQSED | YSLESVVTVPSSSLGTQTYICNVNHKPSNTKVDKKVEPKSCDKTHT |
| | | [hu anti-<huGIPR> | FAVYYCQQYNNWPLT | CPPCPAPELLGGPSVFLFPPKPKDTLMISRTPEVTCVVVDVSHEDPEV |
| | | 21-143_2G10_LC1.003 | FGKGTKVEIKRTVAAP | KFNWYVDGVEVHNAKTKPCEEQYGSTYRCVSVLTVLHQDWLNGK |
| | | VH3 (1-472)(G51(44)E, | SVFIFPPSDEQLKSGTA | EYKCKVSNKALPAPIEKTISKAKGQPREPQVYTLPPSRKEMTKNQVS |
| | | S73(85)A, G65(77)A) | SVVCLLNNFYPREAKV | LTCLVKGFYPSDIAVEWESNGQPENNYKTTPPVLKSDGSFFLYSKLT |
| | | VH]:: huIgG1z- | QWKVDNALQSGNSQE | VDKSRWQQGNVFSCSVMHEALHNHYTQKSLSLSPGK (SEQ ID NO: |
| | | SEFL2-EKK + gila | SVTEQDSKDSTYSLKS | 3759) |
| | | monsterExendin- | TLTLSKADYEKHKVY | |
| | | 4(1-22)(E3D):: | ACEVTHQGLSSPVTKS | |
| | | 1AQ1K(modV,GS):: [hu | FNRGEC (SEQ ID NO: | |
| | | anti-<huGLP-1R> 3E6 | 3468) | |
| | | (C105S, Q141E) | | |
| | | VL]:: huKLC-S176E + | | |
| | | [hu anti-<huGLP-1R> | | |
| | | 3E6.1 (G51(44)K) | | |
| | | VH]:: huIgG1z-SEFL2- | | |
| | | KDD (Hetero-Ig) | | |
| PL- | iPS: | [hu anti-<huGIPR> | EIVMTQSPATLSVSPGE | QVQLVESGGGVVQPGRSLRLSCAASGFTFSNYGMHWVRQAPGEEL |
| 46665 | 424506 | 21-143_2G10_LC1 | RATLSCRASQSVSSNL | EWVAAIWFDASDKYYADAVKGRFTISRDNSKNTLYLQMNSLRAED |
| | | VK3(1-236) | AWYQQKPGQAPRLLIY | TAVYYCARDQAIFGVVPDYWGQGTLVTVSSASTKGPSVFPLAPSSK |
| | | (P141(100)K) | GAATRATGIPARVSGS | STSGGTAALGCLVKDYFPEPVTVSWNSGALTSGVHTFPAVLQSSGL |
| | | VL]:: huKLC-S176K + | GSGTEFTLTISSLQSED | YSLESVVTVPSSSLGTQTYICNVNHKPSNTKVDKKVEPKSCDKTHT |
| | | [hu anti-<huGIPR> | FAVYYCQQYNNWPLT | CPPCPAPELLGGPSVFLFPPKPKDTLMISRTPEVTCVVVDVSHEDPEV |
| | | 21-143_2G10_LC1.003 | FGKGTKVEIKRTVAAP | KFNWYVDGVEVHNAKTKPCEEQYGSTYRCVSVLTVLHQDWLNGK |
| | | VH3 (1-472)(G51(44)E, | SVFIFPPSDEQLKSGTA | EYKCKVSNKALPAPIEKTISKAKGQPREPQVYTLPPSRKEMTKNQVS |
| | | S73(85)A,G65(77)A) | SVVCLLNNFYPREAKV | LTCLVKGFYPSDIAVEWESNGQPENNYKTTPPVLKSDGSFFLYSKLT |
| | | VH]:: huIgG1z- | QWKVDNALQSGNSQE | VDKSRWQQGNVFSCSVMHEALHNHYTQKSLSLSPGK (SEQ ID NO: |
| | | SEFL2-EKK + gila | SVTEQDSKDSTYSLKS | 3760) |
| | | monsterExendin- | TLTLSKADYEKHKVY | |
| | | 4(1-22)(G2S,E3D):: | ACEVTHQGLSSPVTKS | |
| | | 1AQ1K(modV,GS):: [hu | FNRGEC (SEQ ID NO: | |
| | | anti-<huGLP-1R> | 3469) | |
| | | 3E6 (C105S, Q141E) | | |
| | | VL]:: huKLC-S176E + | | |
| | | [hu anti-<huGLP-1R> | | |
| | | 3E6.1 (G51(44)K) | | |
| | | VH]:: huIgG1z-SEFL2- | | |
| | | KDD (Hetero-Ig) | | |
| PL- | iPS: | [anti-<huGIPR> 21- | QVQLVESGGGVVQPGRSLRLSCAASGFTFSNYGMHWVRQAPGKGLEWVA | EIVMTQSPATLSVSPGERATLS |
| 47505 | 427374 | 143_2G10_LC1.007 | AIWFDASDKYYADAVKGRFTISRDNSKNTLYLQMNSLRAEDTAVYYCAR | CRASQSVSSNLAWYQQKPGQ |
| | | VH3 (1-472) | DQAIFGVVPDYWGQGTLVTVSSASTKGPSVFPLAPSSKSTSGGTAALGCLV | APRLLIYGAATRATGIPARFSG |
| | | (S73(85)A, E50(65) | KDYFPEPVTVSWNSGALTSGVHTFPAVLQSSGLYSLSSVVTVPSSSLGTQT | SGSGTEFTLTISSLEPEDFAVY |
| | | K, G65(77)A) | YICNVNHKPSNTKVDKKVEPKSCDKTHTCPPCPAPELLGGPSVFLFPPKPKD | YCQQYNNFPLTFGGGTKVEIK |
| | | VH]:: huIgG1zSEFL2- | TLMISRTPEVTCVVVDVSHEDPCVKFNWYVDGVEVHNAKTKPCEEQYGST | RTVAAPSVFIFPPSDEQLKSGT |
| | | 2_E384C + [Unknown | YRCVSVLTVLHQDWLNGKEYKCKVSNKALPAPIEKTISKAKGQPREPQVY | ASVVCLLNNFYPREAKVQWK |
| | | anti-<huGIPR> 21- | TLPPSREEMTKNQVSLTCLVKGFYPSDIAVEWESNGQPENNYKTTPPVLDS | VDNALQSGNSQESVTEQDSK |
| | | 143_2G10_LC1.007 | DGSFFLYSKLTVDKSRWQQGNVFSCSVMHEALHNHYTQKSLSLSPGK | DSTYSLSSTLTLSKADYEKHK |
| | | VK3 (1- | 3470) | VYACEVTHQGLSSPVTKSFNR |
| | | (SEQ ID NO: 236) | | GEC (SEQ ID NO: 3761) |
| | | (Q97(101)E, V78(84) | | |
| | | F, S98(102)P, W135 | | |
| | | (116)F) VL]:: | | |
| | | huKLC-CL (mAb) | | |
| PL- | iPS: | huGLP-1(A2S, G16E, | HSEGTFTSDVSSYLEEQAAKEFIAWLVKGGGGSGSATGGSGSVASSGSGSA | DIQMTQSPSSLSASIGDRVTIT |
| 47368 | 428006 | R30G):: 1KmodT482V, | THLQVQLVESGGGVVQPGRSLRLSCAASGFTFSYFGMHWVRQAPGKGLE | CRASQDIRDYLGWYQQKPGK |
| | | M493L):: [hu anti- | WVAVIWYDGSNKYYADSVKGRFTISRDNSKNTLYLQMNSLRAEDTAVYY | APKRLIYGASSLQSGVPSRFSG |
| | | <huGIPR> 21-143_6H1 | CARDGTIFGVLLGDYWGQGTLVTVSSASTKGPSVFPLAPSSKSTSGGTAAL | SGSGTEFTLTISSLQPEDFATY |
| | | VH3 | GCLVKDYFPEPVTVSWNSGALTSGVHTFPAVLQSSGLYSLSSVVTVPSSSL | YCLQHNNYPFTFGPGTKVDIK |
| | | VH]:: huIgG1zSEFL2-2 | GTQTYICNVNHKPSNTKVDKKVEPKSCDKTHTCPPCPAPELLGGPSVFLFPP | RTVAAPSVFIFPPSDEQLKSGT |
| | | + [Unknown anti- | KPKDTLMISRTPEVTCVVVDVSHEDPEVKFNWYVDGVEVHNAKTKPCEEQ | ASVVCLLNNFYPREAKVQWK |
| | | <huGIPR> 21-143_4B1 | YGSTYRCVSVLTVLHQDWLNGKEYKCKVSNKALPAPIEKTISKAKGQPRE | VDNALQSGNSQESVTEQDSK |
| | | VK1 (1-236) | PQVYTLPPSREEMTKNQVSLTCLVKGFYPSDIAVEWESNGQPENNYKTTPP | DSTYSLSSTLTLSKADYEKHK |
| | | VL]:: huKLC-CL | VLDSDGSFFLYSKLTVDKSRWQQGNVFSCSVMHEALHNHYTQKSLSLSPG | VYACEVTHQGLSSPVTKSFNR |
| | | (Pepti-HC) | K (SEQ ID NO: 3471) | GEC (SEQ ID NO: 3762) |
| PL- | iPS: | huGLP-1(A2S, E3Q, | HSQGTFTSDVSSYLEEQAAKEFIAWLVKGGGGSGSATGGSGSVASSGSGSA | DIQMTQSPSSLSASIGDRVTIT |
| 47369 | 428007 | G16E, | THLQVQLVESGGGVVQPGRSLRLSCAASGFTFSYFGMHWVRQAPGKGLE | CRASQDIRDYLGWYQQKPGK |
| | | R30G):: 1KmodT482V, | WVAVIWYDGSNKYYADSVKGRFTISRDNSKNTLYLQMNSLRAEDTAVYY | APKRLIYGASSLQSGVPSRFSG |
| | | M493L):: [hu anti- | CARDGTIFGVLLGDYWGQGTLVTVSSASTKGPSVFPLAPSSKSTSGGTAAL | SGSGTEFTLTISSLQPEDFATY |
| | | <huGIPR> 21-143_6H1 | GCLVKDYFPEPVTVSWNSGALTSGVHTFPAVLQSSGLYSLSSVVTVPSSSL | YCLQHNNYPFTFGPGTKVDIK |
| | | VH3 | GTQTYICNVNHKPSNTKVDKKVEPKSCDKTHTCPPCPAPELLGGPSVFLFPP | RTVAAPSVFIFPPSDEQLKSGT |
| | | VH]:huIgG1zSEFL2-2 | KPKDTLMISRTPEVTCVVVDVSHEDPEVKFNWYVDGVEVHNAKTKPCEEQ | ASVVCLLNNFYPREAKVQWK |
| | | + [Unknown anti- | YGSTYRCVSVLTVLHQDWLNGKEYKCKVSNKALPAPIEKTISKAKGQPRE | VDNALQSGNSQESVTEQDSK |
| | | <huGIPR> 21-143_4B1 | PQVYTLPPSREEMTKNQVSLTCLVKGFYPSDIAVEWESNGQPENNYKTTPP | DSTYSLSSTLTLSKADYEKHK |
| | | VK1 (1-236) | VLDSDGSFFLYSKLTVDKSRWQQGNVFSCSVMHEALHNHYTQKSLSLSPG | VYACEVTHQGLSSPVTKSFNR |
| | | VL]:: huKLC-CL | K (SEQ ID NO: 3472) | GEC (SEQ ID NO: 3763) |
| | | (Pepti-HC) | | |
| PL- | iPS: | huGLP-1(A2G, E3D, | HGDGTFTSDVSSYLEEQAAKEFIAWLVKGGGGSGSATGGSGSVASSGSGS | DIQMTQSPSSLSASIGDRVTIT |
| 47370 | 428008 | G16E, | ATHLQVQLVESGGGVVQPGRSLRLSCAASGFTFSYFGMHWVRQAPGKGL | CRASQDIRDYLGWYQQKPGK |
| | | R30G):: 1KmodT482V, | EWVAVIWYDGSNKYYADSVKGRFTISRDNSKNTLYLQMNSLRAEDTAVY | APKRLIYGASSLQSGVPSRFSG |
| | | M493L):: [hu anti- | YCARDGTIFGVLLGDYWGQGTLVTVSSASTKGPSVFPLAPSSKSTSGGTAA | SGSGTEFTLTISSLQPEDFATY |
| | | <huGIPR> 21-143_6H1 | LGCLVKDYFPEPVTVSWNSGALTSGVHTFPAVLQSSGLYSLSSVVTVPSSSL | YCLQHNNYPFTFGPGTKVDIK |
| | | VH3 | GTQTYICNVNHKPSNTKVDKKVEPKSCDKTHTCPPCPAPELLGGPSVFLFPP | RTVAAPSVFIFPPSDEQLKSGT |
| | | VH]:: huIgG1zSEFL2-2 | KPKDTLMISRTPEVTCVVVDVSHEDPEVKFNWYVDGVEVHNAKTKPCEEQ | ASVVCLLNNFYPREAKVQWK |
| | | + [Unknown anti- | YGSTYRCVSVLTVLHQDWLNGKEYKCKVSNKALPAPIEKTISKAKGQPRE | VDNALQSGNSQESVTEQDSK |
| | | <huGIPR> 21-143_4B1 | PQVYTLPPSREEMTKNQVSLTCLVKGFYPSDIAVEWESNGQPENNYKTTPP | DSTYSLSSTLTLSKADYEKHK |
| | | VK1 (1-236) | VLDSDGSFFLYSKLTVDKSRWQQGNVFSCSVMHEALHNHYTQKSLSLSPG | VYACEVTHQGLSSPVTKSFNR |
| | | VL]:: huKLC-CL | K (SEQ ID NO: 3473) | GEC (SEQ ID NO: 3764) |
| | | (Pepti-HC) | | |
| PL- | iPS: | huGLP-1(A2S, E3D, | HSDGTFTSDVSSYLEEQAAKEFIAWLVKGGGGSGSATGGSGSVASSGSGSA | DIQMTQSPSSLSASIGDRVTIT |
| 47371 | 428009 | G16E, | THLQVQLVESGGGVVQPGRSLRLSCAASGFTFSYFGMHWVRQAPGKGLE | CRASQDIRDYLGWYQQKPGK |
| | | R30G):: 1KmodT482V, | WVAVIWYDGSNKYYADSVKGRFTISRDNSKNTLYLQMNSLRAEDTAVYY | APKRLIYGASSLQSGVPSRFSG |
| | | M493L):: [hu anti- | CARDGTIFGVLLGDYWGQGTLVTVSSASTKGPSVFPLAPSSKSTSGGTAAL | SGSGTEFTLTISSLQPEDFATY |
| | | <huGIPR> 21-143_6H1 | GCLVKDYFPEPVTVSWNSGALTSGVHTFPAVLQSSGLYSLSSVVTVPSSSL | YCLQHNNYPFTFGPGTKVDIK |
| | | VH3 | GTQTYICNVNHKPSNTKVDKKVEPKSCDKTHTCPPCPAPELLGGPSVFLFPP | RTVAAPSVFIFPPSDEQLKSGT |
| | | VH]:: huIgG1zSEFL2-2 | KPKDTLMISRTPEVTCVVVDVSHEDPEVKFNWYVDGVEVHNAKTKPCEEQ | ASVVCLLNNFYPREAKVQWK |
| | | + [Unknown anti- | YGSTYRCVSVLTVLHQDWLNGKEYKCKVSNKALPAPIEKTISKAKGQPRE | VDNALQSGNSQESVTEQDSK |
| | | <huGIPR> 21-143_4B1 | PQVYTLPPSREEMTKNQVSLTCLVKGFYPSDIAVEWESNGQPENNYKTTPP | DSTYSLSSTLTLSKADYEKHK |
| | | VK1 (1-236) | VLDSDGSFFLYSKLTVDKSRWQQGNVFSCSVMHEALHNHYTQKSLSLSPG | VYACEVTHQGLSSPVTKSFNR |
| | | VL]:: huKLC-CL | K (SEQ ID NO: 3474) | GEC (SEQ ID NO: 3765) |
| | | (Pepti-HC) | | |
| PL- | iPS: | huGLP-1(A2G, G16E, | HGEGTFTSDVSSYLEEQAAKEFIEWLVKGGGGSGSATGGSGSVASSGSGSA | DIQMTQSPSSLSASIGDRVTIT |
| 47372 | 428011 | A24E, | THLQVQLVESGGGVVQPGRSLRLSCAASGFTFSYFGMHWVRQAPGKGLE | CRASQDIRDYLGWYQQKPGK |
| | | R30G):: 1KmodT482V, | WVAVIWYDGSNKYYADSVKGRFTISRDNSKNTLYLQMNSLRAEDTAVYY | APKRLIYGASSLQSGVPSRFSG |
| | | M493L):: [hu anti- | CARDGTIFGVLLGDYWGQGTLVTVSSASTKGPSVFPLAPSSKSTSGGTAAL | SGSGTEFTLTISSLQPEDFATY |
| | | <huGIPR> 21-143_6H1 | GCLVKDYFPEPVTVSWNSGALTSGVHTFPAVLQSSGLYSLSSVVTVPSSSL | YCLQHNNYPFTFGPGTKVDIK |
| | | VH3 | GTQTYICNVNHKPSNTKVDKKVEPKSCDKTHTCPPCPAPELLGGPSVFLFPP | RTVAAPSVFIFPPSDEQLKSGT |
| | | VH]:: huIgG1zSEFL2-2 | KPKDTLMISRTPEVTCVVVDVSHEDPEVKFNWYVDGVEVHNAKTKPCEEQ | ASVVCLLNNFYPREAKVQWK |
| | | + [Unknown anti- | YGSTYRCVSVLTVLHQDWLNGKEYKCKVSNKALPAPIEKTISKAKGQPRE | VDNALQSGNSQESVTEQDSK |
| | | <huGIPR> 21-143_4B1 | PQVYTLPPSREEMTKNQVSLTCLVKGFYPSDIAVEWESNGQPENNYKTTPP | DSTYSLSSTLTLSKADYEKHK |
| | | VK1 (1-236) | VLDSDGSFFLYSKLTVDKSRWQQGNVFSCSVMHEALHNHYTQKSLSLSPG | VYACEVTHQGLSSPVTKSFNR |
| | | VL]:: huKLC-CL | K (SEQ ID NO: 3475) | GEC (SEQ ID NO: 3766) |
| | | (Pepti-HC) | | |
| PL- | iPS: | huGLP-1(A2S, G16E, | HSEGTFTSDVSSYLEEQAAKEFIEWLVKGGGGSGSATGGSGSVASSGSGSA | DIQMTQSPSSLSASIGDRVTIT |
| 47373 | 428012 | A24E, | THLQVQLVESGGGVVQPGRSLRLSCAASGFTFSYFGMHWVRQAPGKGLE | CRASQDIRDYLGWYQQKPGK |
| | | R30G):: 1KmodT482V, | WVAVIWYDGSNKYYADSVKGRFTISRDNSKNTLYLQMNSLRAEDTAVYY | APKRLIYGASSLQSGVPSRFSG |
| | | M493L):: [hu anti- | CARDGTIFGVLLGDYWGQGTLVTVSSASTKGPSVFPLAPSSKSTSGGTAAL | SGSGTEFTLTISSLQPEDFATY |
| | | <huGIPR> 21-143_6H1 | GCLVKDYFPEPVTVSWNSGALTSGVHTFPAVLQSSGLYSLSSVVTVPSSSL | YCLQHNNYPFTFGPGTKVDIK |
| | | VH3 | GTQTYICNVNHKPSNTKVDKKVEPKSCDKTHTCPPCPAPELLGGPSVFLFPP | RTVAAPSVFIFPPSDEQLKSGT |
| | | VH]:: huIgG1zSEFL2-2 | KPKDTLMISRTPEVTCVVVDVSHEDPEVKFNWYVDGVEVHNAKTKPCEEQ | ASVVCLLNNFYPREAKVQWK |
| | | + [Unknown anti- | YGSTYRCVSVLTVLHQDWLNGKEYKCKVSNKALPAPIEKTISKAKGQPRE | VDNALQSGNSQESVTEQDSK |
| | | <huGIPR> 21-143_4B1 | PQVYTLPPSREEMTKNQVSLTCLVKGFYPSDIAVEWESNGQPENNYKTTPP | DSTYSLSSTLTLSKADYEKHK |
| | | VK1 (1-236) | VLDSDGSFFLYSKLTVDKSRWQQGNVFSCSVMHEALHNHYTQKSLSLSPG | VYACEVTHQGLSSPVTKSFNR |
| | | VL]:: huKLC-CL | K (SEQ ID NO: 3476) | GEC (SEQ ID NO: 3767) |
| | | (Pepti-HC) | | |
| PL- | iPS: | huGLP-1(A2S, E3Q, | HSQGTFTSDVSSYLEEQAAKEFIEWLVKGGGGSGSATGGSGSVASSGSGSA | DIQMTQSPSSLSASIGDRVTIT |
| 47374 | 428013 | G16E, A24E, | THLQVQLVESGGGVVQPGRSLRLSCAASGFTFSYFGMHWVRQAPGKGLE | CRASQDIRDYLGWYQQKPGK |
| | | R30G):: 1KmodT482V, | WVAVIWYDGSNKYYADSVKGRFTISRDNSKNTLYLQMNSLRAEDTAVYY | APKRLIYGASSLQSGVPSRFSG |
| | | M493L):: [hu anti- | CARDGTIFGVLLGDYWGQGTLVTVSSASTKGPSVFPLAPSSKSTSGGTAAL | SGSGTEFTLTISSLQPEDFATY |
| | | <huGIPR> 21-143_6H1 | GCLVKDYFPEPVTVSWNSGALTSGVHTFPAVLQSSGLYSLSSVVTVPSSSL | YCLQHNNYPFTFGPGTKVDIK |
| | | VH3 | GTQTYICNVNHKPSNTKVDKKVEPKSCDKTHTCPPCPAPELLGGPSVFLFPP | RTVAAPSVFIFPPSDEQLKSGT |
| | | VH]:: huIgG1zSEFL2-2 | KPKDTLMISRTPEVTCVVVDVSHEDPEVKFNWYVDGVEVHNAKTKPCEEQ | ASVVCLLNNFYPREAKVQWK |
| | | + [Unknown anti- | YGSTYRCVSVLTVLHQDWLNGKEYKCKVSNKALPAPIEKTISKAKGQPRE | VDNALQSGNSQESVTEQDSK |
| | | <huGIPR> 21-143_4B1 | PQVYTLPPSREEMTKNQVSLTCLVKGFYPSDIAVEWESNGQPENNYKTTPP | DSTYSLSSTLTLSKADYEKHK |
| | | VK1 (1-236) | VLDSDGSFFLYSKLTVDKSRWQQGNVFSCSVMHEALHNHYTQKSLSLSPG | VYACEVTHQGLSSPVTKSFNR |
| | | VL]:: huKLC-CL | K (SEQ ID NO: 3477) | GEC (SEQ ID NO: 3768) |
| | | (Pepti-HC) | | |
| PL- | iPS: | huGLP-1(A2G, E3D, | HGDGTFTSDVSSYLEEQAAKEFIEWLVKGGGGSGSATGGSGSVASSGSGSA | DIQMTQSPSSLSASIGDRVTIT |
| 47375 | 428014 | G16E, A24E, | THLQVQLVESGGGVVQPGRSLRLSCAASGFTFSYFGMHWVRQAPGKGLE | CRASQDIRDYLGWYQQKPGK |
| | | R30G):: 1KmodT482V, | WVAVIWYDGSNKYYADSVKGRFTISRDNSKNTLYLQMNSLRAEDTAVYY | APKRLIYGASSLQSGVPSRFSG |
| | | M493L):: [hu anti- | CARDGTIFGVLLGDYWGQGTLVTVSSASTKGPSVFPLAPSSKSTSGGTAAL | SGSGTEFTLTISSLQPEDFATY |
| | | <huGIPR> 21-143_6H1 | GCLVKDYFPEPVTVSWNSGALTSGVHTFPAVLQSSGLYSLSSVVTVPSSSL | YCLQHNNYPFTFGPGTKVDIK |
| | | VH3 | GTQTYICNVNHKPSNTKVDKKVEPKSCDKTHTCPPCPAPELLGGPSVFLFPP | RTVAAPSVFIFPPSDEQLKSGT |
| | | VH]:: huIgG1zSEFL2-2 | KPKDTLMISRTPEVTCVVVDVSHEDPEVKFNWYVDGVEVHNAKTKPCEEQ | ASVVCLLNNFYPREAKVQWK |
| | | + [Unknown anti- | YGSTYRCVSVLTVLHQDWLNGKEYKCKVSNKALPAPIEKTISKAKGQPRE | VDNALQSGNSQESVTEQDSK |
| | | <huGIPR> 21-143_4B1 | PQVYTLPPSREEMTKNQVSLTCLVKGFYPSDIAVEWESNGQPENNYKTTPP | DSTYSLSSTLTLSKADYEKHK |
| | | VK1 (1-236) | VLDSDGSFFLYSKLTVDKSRWQQGNVFSCSVMHEALHNHYTQKSLSLSPG | VYACEVTHQGLSSPVTKSFNR |
| | | VL]:: huKLC-CL | K (SEQ ID NO: 3478) | GEC (SEQ ID NO: 3769) |
| | | (Pepti-HC) | | |
| PL- | iPS: | huGLP-1(A2S, E3D, | HSDGTFTSDVSSYLEEQAAKEFIEWLVKGGGGSGSATGGSGSVASSGSGSA | DIQMTQSPSSLSASIGDRVTIT |
| 47376 | 428015 | G16E, A24E, | THLQVQLVESGGGVVQPGRSLRLSCAASGFTFSYFGMHWVRQAPGKGLE | CRASQDIRDYLGWYQQKPGK |
| | | R30G):: 1KmodT482V, | WVAVIWYDGSNKYYADSVKGRFTISRDNSKNTLYLQMNSLRAEDTAVYY | APKRLIYGASSLQSGVPSRFSG |
| | | M493L):: [anti- | CARDGTIFGVLLGDYWGQGTLVTVSSASTKGPSVFPLAPSSKSTSGGTAAL | SGSGTEFTLTISSLQPEDFATY |
| | | <huGIPR> 21-143_6H1 | GCLVKDYFPEPVTVSWNSGALTSGVHTFPAVLQSSGLYSLSSVVTVPSSSL | YCLQHNNYPFTFGPGTKVDIK |
| | | VH3 | GTQTYICNVNHKPSNTKVDKKVEPKSCDKTHTCPPCPAPELLGGPSVFLFPP | RTVAAPSVFIFPPSDEQLKSGT |
| | | VH]:: huIgG1zSEFL2-2 | KPKDTLMISRTPEVTCVVVDVSHEDPEVKFNWYVDGVEVHNAKTKPCEEQ | ASVVCLLNNFYPREAKVQWK |
| | | + [Unknown anti- | YGSTYRCVSVLTVLHQDWLNGKEYKCKVSNKALPAPIEKTISKAKGQPRE | VDNALQSGNSQESVTEQDSK |
| | | <huGIPR> 21-143_4B1 | PQVYTLPPSREEMTKNQVSLTCLVKGFYPSDIAVEWESNGQPENNYKTTPP | DSTYSLSSTLTLSKADYEKHK |
| | | VK1 (1-236) | VLDSDGSFFLYSKLTVDKSRWQQGNVFSCSVMHEALHNHYTQKSLSLSPG | VYACEVTHQGLSSPVTKSFNR |
| | | VL]:: huKLC-CL | K (SEQ ID NO: 3479) | GEC (SEQ ID NO: 3770) |
| | | (Pepti-HC) | | |
| PL- | iPS: | huGLP-1(A2G, G16E, | HGEGTFTSDVSSYLEEQAAKEFIAWLKNGGGGSGSATGGSGSVASSGSGSA | DIQMTQSPSSLSASIGDRVTIT |
| 47377 | 428016 | V27K, K28N, | THLQVQLVESGGGVVQPGRSLRLSCAASGFTFSYFGMHWVRQAPGKGLE | CRASQDIRDYLGWYQQKPGK |
| | | R30G):: 1KmodT482V, | WVAVIWYDGSNKYYADSVKGRFTISRDNSKNTLYLQMNSLRAEDTAVYY | APKRLIYGASSLQSGVPSRFSG |
| | | M493L):: [hu anti- | CARDGTIFGVLLGDYWGQGTLVTVSSASTKGPSVFPLAPSSKSTSGGTAAL | SGSGTEFTLTISSLQPEDFATY |
| | | <huGIPR> 21-143_6H1 | GCLVKDYFPEPVTVSWNSGALTSGVHTFPAVLQSSGLYSLSSVVTVPSSSL | YCLQHNNYPFTFGPGTKVDIK |
| | | VH3 | GTQTYICNVNHKPSNTKVDKKVEPKSCDKTHTCPPCPAPELLGGPSVFLFPP | RTVAAPSVFIFPPSDEQLKSGT |
| | | VH]:: huIgG1zSEFL2-2 | KPKDTLMISRTPEVTCVVVDVSHEDPEVKFNWYVDGVEVHNAKTKPCEEQ | ASVVCLLNNFYPREAKVQWK |
| | | + [Unknown anti- | YGSTYRCVSVLTVLHQDWLNGKEYKCKVSNKALPAPIEKTISKAKGQPRE | VDNALQSGNSQESVTEQDSK |
| | | <huGIPR> 21-143_4B1 | PQVYTLPPSREEMTKNQVSLTCLVKGFYPSDIAVEWESNGQPENNYKTTPP | DSTYSLSSTLTLSKADYEKHK |
| | | VK1 (1-236) | VLDSDGSFFLYSKLTVDKSRWQQGNVFSCSVMHEALHNHYTQKSLSLSPG | VYACEVTHQGLSSPVTKSFNR |
| | | VL]:: huKLC-CL | K (SEQ ID NO: 3480) | GEC (SEQ ID NO: 3771) |
| | | (Pepti-HC) | | |
| PL- | iPS: | huGLP-1(A2S, G16E, | HSEGTFTSDVSSYLEEQAAKEFIAWLKNGGGGSGSATGGSGSVASSGSGSA | DIQMTQSPSSLSASIGDRVTIT |
| 47378 | 428017 | V27K, K28N, | THLQVQLVESGGGVVQPGRSLRLSCAASGFTFSYFGMHWVRQAPGKGLE | CRASQDIRDYLGWYQQKPGK |
| | | R30G):: 1KmodT482V, | WVAVIWYDGSNKYYADSVKGRFTISRDNSKNTLYLQMNSLRAEDTAVYY | APKRLIYGASSLQSGVPSRFSG |
| | | M493L):: [hu anti- | CARDGTIFGVLLGDYWGQGTLVTVSSASTKGPSVFPLAPSSKSTSGGTAAL | SGSGTEFTLTISSLQPEDFATY |
| | | <huGIPR> 21-143_6H1 | GCLVKDYFPEPVTVSWNSGALTSGVHTFPAVLQSSGLYSLSSVVTVPSSSL | YCLQHNNYPFTFGPGTKVDIK |
| | | VH3 | GTQTYICNVNHKPSNTKVDKKVEPKSCDKTHTCPPCPAPELLGGPSVFLFPP | RTVAAPSVFIFPPSDEQLKSGT |
| | | VH]:: huIgG1zSEFL2-2 | KPKDTLMISRTPEVTCVVVDVSHEDPEVKFNWYVDGVEVHNAKTKPCEEQ | ASVVCLLNNFYPREAKVQWK |
| | | + [Unknown anti- | YGSTYRCVSVLTVLHQDWLNGKEYKCKVSNKALPAPIEKTISKAKGQPRE | VDNALQSGNSQESVTEQDSK |
| | | <huGIPR> 21-143_4B1 | PQVYTLPPSREEMTKNQVSLTCLVKGFYPSDIAVEWESNGQPENNYKTTPP | DSTYSLSSTLTLSKADYEKHK |
| | | VK1 (1-236) | VLDSDGSFFLYSKLTVDKSRWQQGNVFSCSVMHEALHNHYTQKSLSLSPG | VYACEVTHQGLSSPVTKSFNR |
| | | VL]:: huKLC-CL | K (SEQ ID NO: 3481) | GEC (SEQ ID NO: 3772) |
| | | (Pepti-HC) | | |
| PL- | iPS: | huGLP-1(A2S, E3Q, | HSQGTFTSDVSSYLEEQAAKEFIAWLKNGGGGSGSATGGSGSVASSGSGSA | DIQMTQSPSSLSASIGDRVTIT |
| 47379 | 428018 | G16E, V27K, K28N, | THLQVQLVESGGGVVQPGRSLRLSCAASGFTFSYFGMHWVRQAPGKGLE | CRASQDIRDYLGWYQQKPGK |
| | | R30G):: 1KmodT482V, | WVAVIWYDGSNKYYADSVKGRFTISRDNSKNTLYLQMNSLRAEDTAVYY | APKRLIYGASSLQSGVPSRFSG |
| | | M493L):: [hu anti- | CARDGTIFGVLLGDYWGQGTLVTVSSASTKGPSVFPLAPSSKSTSGGTAAL | SGSGTEFTLTISSLQPEDFATY |
| | | <huGIPR> 21-143_6H1 | GCLVKDYFPEPVTVSWNSGALTSGVHTFPAVLQSSGLYSLSSVVTVPSSSL | YCLQHNNYPFTFGPGTKVDIK |
| | | VH3 | GTQTYICNVNHKPSNTKVDKKVEPKSCDKTHTCPPCPAPELLGGPSVFLFPP | RTVAAPSVFIFPPSDEQLKSGT |
| | | VH]:: huIgG1zSEFL2-2 | KPKDTLMISRTPEVTCVVVDVSHEDPEVKFNWYVDGVEVHNAKTKPCEEQ | ASVVCLLNNFYPREAKVQWK |
| | | + [Unknown anti- | YGSTYRCVSVLTVLHQDWLNGKEYKCKVSNKALPAPIEKTISKAKGQPRE | VDNALQSGNSQESVTEQDSK |
| | | <huGIPR> 21-143_4B1 | PQVYTLPPSREEMTKNQVSLTCLVKGFYPSDIAVEWESNGQPENNYKTTPP | DSTYSLSSTLTLSKADYEKHK |
| | | VK1 (1-236) | VLDSDGSFFLYSKLTVDKSRWQQGNVFSCSVMHEALHNHYTQKSLSLSPG | VYACEVTHQGLSSPVTKSFNR |
| | | VL]:: huKLC-CL | K (SEQ ID NO: 3482) | GEC (SEQ ID NO: 3773) |
| | | (Pepti-HC) | | |
| PL- | iPS: | huGLP-1(A2G, E3D, | HGDGTFTSDVSSYLEEQAAKEFIAWLKNGGGGSGSATGGSGSVASSGSGS | DIQMTQSPSSLSASIGDRVTIT |
| 47380 | 428019 | G16E, V27K, K28N, | ATHLQVQLVESGGGVVQPGRSLRLSCAASGFTFSYFGMHWVRQAPGKGL | CRASQDIRDYLGWYQQKPGK |
| | | R30G):: 1KmodT482V, | EWVAVIWYDGSNKYYADSVKGRFTISRDNSKNTLYLQMNSLRAEDTAVY | APKRLIYGASSLQSGVPSRFSG |
| | | M493L):: [hu anti- | YCARDGTIFGVLLGDYWGQGTLVTVSSASTKGPSVFPLAPSSKSTSGGTAA | SGSGTEFTLTISSLQPEDFATY |
| | | <huGIPR> 21-143_6H1 | LGCLVKDYFPEPVTVSWNSGALTSGVHTFPAVLQSSGLYSLSSVVTVPSSSL | YCLQHNNYPFTFGPGTKVDIK |
| | | VH3 | GTQTYICNVNHKPSNTKVDKKVEPKSCDKTHTCPPCPAPELLGGPSVFLFPP | RTVAAPSVFIFPPSDEQLKSGT |
| | | VH]:: huIgG1zSEFL2-2 | KPKDTLMISRTPEVTCVVVDVSHEDPEVKFNWYVDGVEVHNAKTKPCEEQ | ASVVCLLNNFYPREAKVQWK |
| | | + [Unknown anti- | YGSTYRCVSVLTVLHQDWLNGKEYKCKVSNKALPAPIEKTISKAKGQPRE | VDNALQSGNSQESVTEQDSK |
| | | <huGIPR> 21-143_4B1 | PQVYTLPPSREEMTKNQVSLTCLVKGFYPSDIAVEWESNGQPENNYKTTPP | DSTYSLSSTLTLSKADYEKHK |
| | | VK1 (1-236) | VLDSDGSFFLYSKLTVDKSRWQQGNVFSCSVMHEALHNHYTQKSLSLSPG | VYACEVTHQGLSSPVTKSFNR |
| | | VL]:: huKLC-CL | K (SEQ ID NO: 3483) | GEC (SEQ ID NO: 3774) |
| | | (Pepti-HC) | | |
| PL- | iPS: | huGLP-1(A2S, E3D, | HSDGTFTSDVSSYLEEQAAKEFIAWLKNGGGGSGSATGGSGSVASSGSGSA | DIQMTQSPSSLSASIGDRVTIT |
| 47381 | 428020 | G16E, V27K, K28N, | THLQVQLVESGGGVVQPGRSLRLSCAASGFTFSYFGMHWVRQAPGKGLE | CRASQDIRDYLGWYQQKPGK |
| | | R30G):: 1KmodT482V, | WVAVIWYDGSNKYYADSVKGRFTISRDNSKNTLYLQMNSLRAEDTAVYY | APKRLIYGASSLQSGVPSRFSG |
| | | M493L):: [hu anti- | CARDGTIFGVLLGDYWGQGTLVTVSSASTKGPSVFPLAPSSKSTSGGTAAL | SGSGTEFTLTISSLQPEDFATY |
| | | <huGIPR> 21-143_6H1 | GCLVKDYFPEPVTVSWNSGALTSGVHTFPAVLQSSGLYSLSSVVTVPSSSL | YCLQHNNYPFTFGPGTKVDIK |
| | | VH3 | GTQTYICNVNHKPSNTKVDKKVEPKSCDKTHTCPPCPAPELLGGPSVFLFPP | RTVAAPSVFIFPPSDEQLKSGT |
| | | VH]:: huIgG1zSEFL2-2 | KPKDTLMISRTPEVTCVVVDVSHEDPEVKFNWYVDGVEVHNAKTKPCEEQ | ASVVCLLNNFYPREAKVQWK |
| | | + [Unknown anti- | YGSTYRCVSVLTVLHQDWLNGKEYKCKVSNKALPAPIEKTISKAKGQPRE | VDNALQSGNSQESVTEQDSK |
| | | <huGIPR> 21-143_4B1 | PQVYTLPPSREEMTKNQVSLTCLVKGFYPSDIAVEWESNGQPENNYKTTPP | DSTYSLSSTLTLSKADYEKHK |
| | | VK1 (1-236) | VLDSDGSFFLYSKLTVDKSRWQQGNVFSCSVMHEALHNHYTQKSLSLSPG | VYACEVTHQGLSSPVTKSFNR |
| | | VL]:: huKLC-CL | K (SEQ ID NO: 3484) | GEC (SEQ ID NO: 3775) |
| | | (Pepti-HC) | | |
| PL- | iPS: | huGLP-1(A2G, G16E, | HGEGTFTSDVSSYLEEQAAKEFIEWLKNGGGGSGSATGGSGSVASSGSGSA | DIQMTQSPSSLSASIGDRVTIT |
| 47382 | 428021 | A24E, V27K, K28N, | THLQVQLVESGGGVVQPGRSLRLSCAASGFTFSYFGMHWVRQAPGKGLE | CRASQDIRDYLGWYQQKPGK |
| | | R30G):: 1KmodT482V, | WVAVIWYDGSNKYYADSVKGRFTISRDNSKNTLYLQMNSLRAEDTAVYY | APKRLIYGASSLQSGVPSRFSG |
| | | M493L):: [hu anti- | CARDGTIFGVLLGDYWGQGTLVTVSSASTKGPSVFPLAPSSKSTSGGTAAL | SGSGTEFTLTISSLQPEDFATY |
| | | <huGIPR> 21-143_6H1 | GCLVKDYFPEPVTVSWNSGALTSGVHTFPAVLQSSGLYSLSSVVTVPSSSL | YCLQHNNYPFTFGPGTKVDIK |
| | | VH3 | GTQTYICNVNHKPSNTKVDKKVEPKSCDKTHTCPPCPAPELLGGPSVFLFPP | RTVAAPSVFIFPPSDEQLKSGT |
| | | VH]:huIgG1zSEFL2-2 | KPKDTLMISRTPEVTCVVVDVSHEDPEVKFNWYVDGVEVHNAKTKPCEEQ | ASVVCLLNNFYPREAKVQWK |
| | | + [Unknown anti- | YGSTYRCVSVLTVLHQDWLNGKEYKCKVSNKALPAPIEKTISKAKGQPRE | VDNALQSGNSQESVTEQDSK |
| | | <huGIPR> 21-143_4B1 | PQVYTLPPSREEMTKNQVSLTCLVKGFYPSDIAVEWESNGQPENNYKTTPP | DSTYSLSSTLTLSKADYEKHK |
| | | VK1 (1-236) | VLDSDGSFFLYSKLTVDKSRWQQGNVFSCSVMHEALHNHYTQKSLSLSPG | VYACEVTHQGLSSPVTKSFNR |
| | | VL]:: huKLC-CL | K (SEQ ID NO: 3485) | GEC (SEQ ID NO: 3776) |
| | | (Pepti-HC) | | |
| PL- | iPS: | huGLP-1(A2S, G16E, | HSEGTFTSDVSSYLEEQAAKEFIEWLKNGGGGSGSATGGSGSVASSGSGSA | DIQMTQSPSSLSASIGDRVTIT |
| 47383 | 428022 | A24E, V27K, K28N, | THLQVQLVESGGGVVQPGRSLRLSCAASGFTFSYFGMHWVRQAPGKGLE | CRASQDIRDYLGWYQQKPGK |
| | | R30G):: 1KmodT482V, | WVAVIWYDGSNKYYADSVKGRFTISRDNSKNTLYLQMNSLRAEDTAVYY | APKRLIYGASSLQSGVPSRFSG |
| | | M493L):: [hu anti- | CARDGTIFGVLLGDYWGQGTLVTVSSASTKGPSVFPLAPSSKSTSGGTAAL | SGSGTEFTLTISSLQPEDFATY |
| | | <huGIPR> 21-143_6H1 | GCLVKDYFPEPVTVSWNSGALTSGVHTFPAVLQSSGLYSLSSVVTVPSSSL | YCLQHNNYPFTFGPGTKVDIK |
| | | VH3 | GTQTYICNVNHKPSNTKVDKKVEPKSCDKTHTCPPCPAPELLGGPSVFLFPP | RTVAAPSVFIFPPSDEQLKSGT |
| | | VH]:: huIgG1zSEFL2-2 | KPKDTLMISRTPEVTCVVVDVSHEDPEVKFNWYVDGVEVHNAKTKPCEEQ | ASVVCLLNNFYPREAKVQWK |
| | | + [Unknown anti- | YGSTYRCVSVLTVLHQDWLNGKEYKCKVSNKALPAPIEKTISKAKGQPRE | VDNALQSGNSQESVTEQDSK |
| | | <huGIPR> 21-143_4B1 | PQVYTLPPSREEMTKNQVSLTCLVKGFYPSDIAVEWESNGQPENNYKTTPP | DSTYSLSSTLTLSKADYEKHK |
| | | VK1 (1-236) | VLDSDGSFFLYSKLTVDKSRWQQGNVFSCSVMHEALHNHYTQKSLSLSPG | VYACEVTHQGLSSPVTKSFNR |
| | | VL]:: huKLC-CL | K (SEQ ID NO: 3486) | GEC (SEQ ID NO: 3777) |
| | | (Pepti-HC) | | |
| PL- | iPS: | huGLP-1(A2S, G16E, | HSEGTFTSDVSSYLEEQAAKEFIEWLKNGGGGSGSATGGSGSVASSGSGSA | DIQMTQSPSSLSASIGDRVTIT |
| 48488 | 428022 | A24E, V27K, K28N, | THLQVQLVESGGGVVQPGRSLRLSCAASGFTFSYFGMHWVRQAPGKGLE | CRASQDIRDYLGWYQQKPGK |
| | | R30G):: 1KmodT482V, | WVAVIWYDGSNKYYADSVKGRFTISRDNSKNTLYLQMNSLRAEDTAVYY | APKRLIYGASSLQSGVPSRFSG |
| | | M493L):: [hu anti- | CARDGTIFGVLLGDYWGQGTLVTVSSASTKGPSVFPLAPSSKSTSGGTAAL | SGSGTEFTLTISSLQPEDFATY |
| | | <huGIPR> 21-143_6H1 | GCLVKDYFPEPVTVSWNSGALTSGVHTFPAVLQSSGLYSLSSVVTVPSSSL | YCLQHNNYPFTFGPGTKVDIK |
| | | VH3 | GTQTYICNVNHKPSNTKVDKKVEPKSCDKTHTCPPCPAPELLGGPSVFLFPP | RTVAAPSVFIFPPSDEQLKSGT |
| | | VH]:: huIgG1zSEFL2-2 | KPKDTLMISRTPEVTCVVVDVSHEDPEVKFNWYVDGVEVHNAKTKPCEEQ | ASVVCLLNNFYPREAKVQWK |
| | | + [Unknown anti- | YGSTYRCVSVLTVLHQDWLNGKEYKCKVSNKALPAPIEKTISKAKGQPRE | VDNALQSGNSQESVTEQDSK |
| | | <huGIPR> 21-143_4B1 | PQVYTLPPSREEMTKNQVSLTCLVKGFYPSDIAVEWESNGQPENNYKTTPP | DSTYSLSSTLTLSKADYEKHK |
| | | VK1 (1-236) | VLDSDGSFFLYSKLTVDKSRWQQGNVFSCSVMHEALHNHYTQKSLSLSPG | VYACEVTHQGLSSPVTKSFNR |
| | | VL]:: huKLC-CL | K (SEQ ID NO: 3487) | GEC (SEQ ID NO: 3778) |
| | | (Pepti-HC) | | |
| PL- | iPS: | huGLP-1(A2S, E3Q, | HSQGTFTSDVSSYLEEQAAKEFIEWLKNGGGGSGSATGGSGSVASSGSGSA | DIQMTQSPSSLSASIGDRVTIT |
| 47384 | 428023 | G16E, A24E, V27K, | THLQVQLVESGGGVVQPGRSLRLSCAASGFTFSYFGMHWVRQAPGKGLE | CRASQDIRDYLGWYQQKPGK |
| | | K28N, | WVAVIWYDGSNKYYADSVKGRFTISRDNSKNTLYLQMNSLRAEDTAVYY | APKRLIYGASSLQSGVPSRFSG |
| | | R30G):: 1KmodT482V, | CARDGTIFGVLLGDYWGQGTLVTVSSASTKGPSVFPLAPSSKSTSGGTAAL | SGSGTEFTLTISSLQPEDFATY |
| | | M493L):: [hu anti- | GCLVKDYFPEPVTVSWNSGALTSGVHTFPAVLQSSGLYSLSSVVTVPSSSL | YCLQHNNYPFTFGPGTKVDIK |
| | | <huGIPR> 21-143_6H1 | GTQTYICNVNHKPSNTKVDKKVEPKSCDKTHTCPPCPAPELLGGPSVFLFPP | RTVAAPSVFIFPPSDEQLKSGT |
| | | VH3 | KPKDTLMISRTPEVTCVVVDVSHEDPEVKFNWYVDGVEVHNAKTKPCEEQ | ASVVCLLNNFYPREAKVQWK |
| | | VH]:huIgG1zSEFL2-2 | YGSTYRCVSVLTVLHQDWLNGKEYKCKVSNKALPAPIEKTISKAKGQPRE | VDNALQSGNSQESVTEQDSK |
| | | + [Unknown anti- | PQVYTLPPSREEMTKNQVSLTCLVKGFYPSDIAVEWESNGQPENNYKTTPP | DSTYSLSSTLTLSKADYEKHK |
| | | <huGIPR> 21-143_4B1 | VLDSDGSFFLYSKLTVDKSRWQQGNVFSCSVMHEALHNHYTQKSLSLSPG | VYACEVTHQGLSSPVTKSFNR |
| | | VK1 (1-236) | K (SEQ ID NO: 3488) | GEC (SEQ ID NO: 3779) |
| | | VL]:: huKLC-CL | | |
| | | (Pepti-HC) | | |
| PL- | iPS: | huGLP-1(A2G, E3D, | HGDGTFTSDVSSYLEEQAAKEFIEWLKNGGGGSGSATGGSGSVASSGSGSA | DIQMTQSPSSLSASIGDRVTIT |
| 47385 | 428024 | G16E, A24E, V27K, | THLQVQLVESGGGVVQPGRSLRLSCAASGFTFSYFGMHWVRQAPGKGLE | CRASQDIRDYLGWYQQKPGK |
| | | K28N, | WVAVIWYDGSNKYYADSVKGRFTISRDNSKNTLYLQMNSLRAEDTAVYY | APKRLIYGASSLQSGVPSRFSG |
| | | R30G):: 1KmodT482V, | CARDGTIFGVLLGDYWGQGTLVTVSSASTKGPSVFPLAPSSKSTSGGTAAL | SGSGTEFTLTISSLQPEDFATY |
| | | M493L):: [hu anti- | GCLVKDYFPEPVTVSWNSGALTSGVHTFPAVLQSSGLYSLSSVVTVPSSSL | YCLQHNNYPFTFGPGTKVDIK |
| | | <huGIPR> 21-143_6H1 | GTQTYICNVNHKPSNTKVDKKVEPKSCDKTHTCPPCPAPELLGGPSVFLFPP | RTVAAPSVFIFPPSDEQLKSGT |
| | | VH3 | KPKDTLMISRTPEVTCVVVDVSHEDPEVKFNWYVDGVEVHNAKTKPCEEQ | ASVVCLLNNFYPREAKVQWK |
| | | VH]:: huIgG1zSEFL2-2 | YGSTYRCVSVLTVLHQDWLNGKEYKCKVSNKALPAPIEKTISKAKGQPRE | VDNALQSGNSQESVTEQDSK |
| | | + [Unknown anti- | PQVYTLPPSREEMTKNQVSLTCLVKGFYPSDIAVEWESNGQPENNYKTTPP | DSTYSLSSTLTLSKADYEKHK |
| | | <huGIPR> 21-143_4B1 | VLDSDGSFFLYSKLTVDKSRWQQGNVFSCSVMHEALHNHYTQKSLSLSPG | VYACEVTHQGLSSPVTKSFNR |
| | | VK1 (1-236) | K (SEQ ID NO: 3489) | GEC (SEQ ID NO: 3780) |
| | | VL]:: huKLC-CL | | |
| | | (Pepti-HC) | | |
| PL- | iPS: | huGLP-1(A2S, E3D, | HSDGTFTSDVSSYLEEQAAKEFIEWLKNGGGGSGSATGGSGSVASSGSGSA | DIQMTQSPSSLSASIGDRVTIT |
| 47386 | 428025 | G16E, A24E, V27K, | THLQVQLVESGGGVVQPGRSLRLSCAASGFTFSYFGMHWVRQAPGKGLE | CRASQDIRDYLGWYQQKPGK |
| | | K28N, | WVAVIWYDGSNKYYADSVKGRFTISRDNSKNTLYLQMNSLRAEDTAVYY | APKRLIYGASSLQSGVPSRFSG |
| | | R30G):: 1KmodT482V, | CARDGTIFGVLLGDYWGQGTLVTVSSASTKGPSVFPLAPSSKSTSGGTAAL | SGSGTEFTLTISSLQPEDFATY |
| | | M493L):: [hu anti- | GCLVKDYFPEPVTVSWNSGALTSGVHTFPAVLQSSGLYSLSSVVTVPSSSL | YCLQHNNYPFTFGPGTKVDIK |
| | | <huGIPR> 21-143_6H1 | GTQTYICNVNHKPSNTKVDKKVEPKSCDKTHTCPPCPAPELLGGPSVFLFPP | RTVAAPSVFIFPPSDEQLKSGT |
| | | VH3 | KPKDTLMISRTPEVTCVVVDVSHEDPEVKFNWYVDGVEVHNAKTKPCEEQ | ASVVCLLNNFYPREAKVQWK |
| | | VH]:: huIgG1zSEFL2-2 | YGSTYRCVSVLTVLHQDWLNGKEYKCKVSNKALPAPIEKTISKAKGQPRE | VDNALQSGNSQESVTEQDSK |
| | | + [Unknown anti- | PQVYTLPPSREEMTKNQVSLTCLVKGFYPSDIAVEWESNGQPENNYKTTPP | DSTYSLSSTLTLSKADYEKHK |
| | | <huGIPR> 21-143_4B1 | VLDSDGSFFLYSKLTVDKSRWQQGNVFSCSVMHEALHNHYTQKSLSLSPG | VYACEVTHQGLSSPVTKSFNR |
| | | VK1 (1-236) | K (SEQ ID NO: 3490) | GEC (SEQ ID NO: 3781) |
| | | VL]:: huKLC-CL | | |
| | | (Pepti-HC) | | |
| PL- | iPS: | huGLP-1(A2G, G16E, | HGEGTFTSDVSSYLEEQAAKEFIAWLVKGGGGGGGAGGGGAGGGGAGGG | DIQMTQSPSSLSASIGDRVTIT |
| 47387 | 428026 | R30G):: (G4A)3:: G4:: | GQVQLVESGGGVVQPGRSLRLSCAASGFTFSYFGMHWVRQAPGKGLEWV | CRASQDIRDYLGWYQQKPGK |
| | | [huanti-<huGIPR> 21- | AVIWYDGSNKYYADSVKGRFTISRDNSKNTLYLQMNSLRAEDTAVYYCA | APKRLIYGASSLQSGVPSRFSG |
| | | 143_6H1 VH3 | RDGTIFGVLLGDYWGQGTLVTVSSASTKGPSVFPLAPSSKSTSGGTAALGC | SGSGTEFTLTISSLQPEDFATY |
| | | VH]:: huIgG1zSEFL2-2 | LVKDYFPEPVTVSWNSGALTSGVHTFPAVLQSSGLYSLSSVVTVPSSSLGT | YCLQHNNYPFTFGPGTKVDIK |
| | | + [Unknown anti- | QTYICNVNHKPSNTKVDKKVEPKSCDKTHTCPPCPAPELLGGPSVFLFPPKP | RTVAAPSVFIFPPSDEQLKSGT |
| | | <huGIPR> 21-143_4B1 | KDTLMISRTPEVTCVVVDVSHEDPEVKFNWYVDGVEVHNAKTKPCEEQY | ASVVCLLNNFYPREAKVQWK |
| | | VK1 (1-236) | GSTYRCVSVLTVLHQDWLNGKEYKCKVSNKALPAPIEKTISKAKGQPREP | VDNALQSGNSQESVTEQDSK |
| | | VL]:: huKLC-CL | QVYTLPPSREEMTKNQVSLTCLVKGFYPSDIAVEWESNGQPENNYKTTPPV | DSTYSLSSTLTLSKADYEKHK |
| | | H(Pepti-C) | LDSDGSFFLYSKLTVDKSRWQQGNVFSCSVMHEALHNHYTQKSLSLSPGK | VYACEVTHQGLSSPVTKSFNR |
| | | | (SEQ ID NO: 3491) | GEC (SEQ ID NO: 3782) |
| PL- | iPS: | huGLP-1(A2S, G16E, | HSEGTFTSDVSSYLEEQAAKEFIAWLVKGGGGGGGAGGGGAGGGGAGGG | DIQMTQSPSSLSASIGDRVTIT |
| 47388 | 428028 | R30G):: (G4A)3:: G4:: | GQVQLVESGGGVVQPGRSLRLSCAASGFTFSYFGMHWVRQAPGKGLEWV | CRASQDIRDYLGWYQQKPGK |
| | | [huanti-<huGIPR> 21- | AVIWYDGSNKYYADSVKGRFTISRDNSKNTLYLQMNSLRAEDTAVYYCA | APKRLIYGASSLQSGVPSRFSG |
| | | 143_6H1 VH3 | RDGTIFGVLLGDYWGQGTLVTVSSASTKGPSVFPLAPSSKSTSGGTAALGC | SGSGTEFTLTISSLQPEDFATY |
| | | VH]:: huIgG1zSEFL2-2 | LVKDYFPEPVTVSWNSGALTSGVHTFPAVLQSSGLYSLSSVVTVPSSSLGT | YCLQHNNYPFTFGPGTKVDIK |
| | | + [Unknown anti- | QTYICNVNHKPSNTKVDKKVEPKSCDKTHTCPPCPAPELLGGPSVFLFPPKP | RTVAAPSVFIFPPSDEQLKSGT |
| | | <huGIPR> 21-143_4B1 | KDTLMISRTPEVTCVVVDVSHEDPEVKFNWYVDGVEVHNAKTKPCEEQY | ASVVCLLNNFYPREAKVQWK |
| | | VK1 (1-236) | GSTYRCVSVLTVLHQDWLNGKEYKCKVSNKALPAPIEKTISKAKGQPREP | VDNALQSGNSQESVTEQDSK |
| | | VL]:: huKLC-CL | QVYTLPPSREEMTKNQVSLTCLVKGFYPSDIAVEWESNGQPENNYKTTPPV | DSTYSLSSTLTLSKADYEKHK |
| | | (Pepti-HC) | LDSDGSFFLYSKLTVDKSRWQQGNVFSCSVMHEALHNHYTQKSLSLSPGK | VYACEVTHQGLSSPVTKSFNR |
| | | | (SEQ ID NO: 3492) | GEC (SEQ ID NO: 3783) |
| PL- | iPS: | huGLP-1(A2S, E3Q, | HSQGTFTSDVSSYLEEQAAKEFIAWLVKGGGGGGGAGGGGAGGGGAGGG | DIQMTQSPSSLSASIGDRVTIT |
| 47389 | 428029 | G16E, | GQVQLVESGGGVVQPGRSLRLSCAASGFTFSYFGMHWVRQAPGKGLEWV | CRASQDIRDYLGWYQQKPGK |
| | | R30G):: (G4A)3:: G4:: | AVIWYDGSNKYYADSVKGRFTISRDNSKNTLYLQMNSLRAEDTAVYYCA | APKRLIYGASSLQSGVPSRFSG |
| | | [huanti-<huGIPR> 21- | RDGTIFGVLLGDYWGQGTLVTVSSASTKGPSVFPLAPSSKSTSGGTAALGC | SGSGTEFTLTISSLQPEDFATY |
| | | 143_6H1 VH3 | LVKDYFPEPVTVSWNSGALTSGVHTFPAVLQSSGLYSLSSVVTVPSSSLGT | YCLQHNNYPFTFGPGTKVDIK |
| | | VH]:: huIgG1zSEFL2-2 | QTYICNVNHKPSNTKVDKKVEPKSCDKTHTCPPCPAPELLGGPSVFLFPPKP | RTVAAPSVFIFPPSDEQLKSGT |
| | | + [Unknown anti- | KDTLMISRTPEVTCVVVDVSHEDPEVKFNWYVDGVEVHNAKTKPCEEQY | ASVVCLLNNFYPREAKVQWK |
| | | <huGIPR> 21-143_4B1 | GSTYRCVSVLTVLHQDWLNGKEYKCKVSNKALPAPIEKTISKAKGQPREP | VDNALQSGNSQESVTEQDSK |
| | | VK1 (1-236) | QVYTLPPSREEMTKNQVSLTCLVKGFYPSDIAVEWESNGQPENNYKTTPPV | DSTYSLSSTLTLSKADYEKHK |
| | | VL]:: huKLC-CL | LDSDGSFFLYSKLTVDKSRWQQGNVFSCSVMHEALHNHYTQKSLSLSPGK | VYACEVTHQGLSSPVTKSFNR |
| | | (Pepti-HC) | (SEQ ID NO: 3493) | GEC (SEQ ID NO: 3784) |
| PL- | iPS: | huGLP-1(A2G, E3D, | HGDGTFTSDVSSYLEEQAAKEFIAWLVKGGGGGGGAGGGGAGGGGAGG | DIQMTQSPSSLSASIGDRVTIT |
| 47390 | 428030 | G16E, R30G):: | GGQVQLVESGGGVVQPGRSLRLSCAASGFTFSYFGMHWVRQAPGKGLEW | CRASQDIRDYLGWYQQKPGK |
| | | (G4A)3:: G4:: [hu | VAVIWYDGSNKYYADSVKGRFTISRDNSKNTLYLQMNSLRAEDTAVYYC | APKRLIYGASSLQSGVPSRFSG |
| | | anti-<huGIPR> 21- | ARDGTIFGVLLGDYWGQGTLVTVSSASTKGPSVFPLAPSSKSTSGGTAALG | SGSGTEFTLTISSLQPEDFATY |
| | | 143_6H1 VH3 | CLVKDYFPEPVTVSWNSGALTSGVHTFPAVLQSSGLYSLSSVVTVPSSSLGT | YCLQHNNYPFTFGPGTKVDIK |
| | | VH]:huIgG1zSEFL2-2 | QTYICNVNHKPSNTKVDKKVEPKSCDKTHTCPPCPAPELLGGPSVFLFPPKP | RTVAAPSVFIFPPSDEQLKSGT |
| | | + [Unknown anti- | KDTLMISRTPEVTCVVVDVSHEDPEVKFNWYVDGVEVHNAKTKPCEEQY | ASVVCLLNNFYPREAKVQWK |
| | | <huGIPR> 21-143_4B1 | GSTYRCVSVLTVLHQDWLNGKEYKCKVSNKALPAPIEKTISKAKGQPREP | VDNALQSGNSQESVTEQDSK |
| | | VK1 (1-236) | QVYTLPPSREEMTKNQVSLTCLVKGFYPSDIAVEWESNGQPENNYKTTPPV | DSTYSLSSTLTLSKADYEKHK |
| | | VL]:: huKLC-CL | LDSDGSFFLYSKLTVDKSRWQQGNVFSCSVMHEALHNHYTQKSLSLSPGK | VYACEVTHQGLSSPVTKSFNR |
| | | (Pepti-HC) | (SEQ ID NO: 3494) | GEC (SEQ ID NO: 3785) |
| PL- | iPS: | huGLP-1(A2S, E3D, | HSDGTFTSDVSSYLEEQAAKEFIAWLVKGGGGGGGAGGGGAGGGGAGGG | DIQMTQSPSSLSASIGDRVTIT |
| 47391 | 428031 | G16E, R30G):: | GQVQLVESGGGVVQPGRSLRLSCAASGFTFSYFGMHWVRQAPGKGLEWV | CRASQDIRDYLGWYQQKPGK |
| | | (G4A)3:: G4:: [hu | AVIWYDGSNKYYADSVKGRFTISRDNSKNTLYLQMNSLRAEDTAVYYCA | APKRLIYGASSLQSGVPSRFSG |
| | | anti-<huGIPR> 21- | RDGTIFGVLLGDYWGQGTLVTVSSASTKGPSVFPLAPSSKSTSGGTAALGC | SGSGTEFTLTISSLQPEDFATY |
| | | 143_6H1 VH3 | LVKDYFPEPVTVSWNSGALTSGVHTFPAVLQSSGLYSLSSVVTVPSSSLGT | YCLQHNNYPFTFGPGTKVDIK |
| | | VH]:: huIgG1zSEFL2-2 | QTYICNVNHKPSNTKVDKKVEPKSCDKTHTCPPCPAPELLGGPSVFLFPPKP | RTVAAPSVFIFPPSDEQLKSGT |
| | | + [Unknown anti- | KDTLMISRTPEVTCVVVDVSHEDPEVKFNWYVDGVEVHNAKTKPCEEQY | ASVVCLLNNFYPREAKVQWK |
| | | <huGIPR> 21-143_4B1 | GSTYRCVSVLTVLHQDWLNGKEYKCKVSNKALPAPIEKTISKAKGQPREP | VDNALQSGNSQESVTEQDSK |
| | | VK1 (1-236) | QVYTLPPSREEMTKNQVSLTCLVKGFYPSDIAVEWESNGQPENNYKTTPPV | DSTYSLSSTLTLSKADYEKHK |
| | | VL]:: huKLC-CL | LDSDGSFFLYSKLTVDKSRWQQGNVFSCSVMHEALHNHYTQKSLSLSPGK | VYACEVTHQGLSSPVTKSFNR |
| | | (Pepti-HC) | (SEQ ID NO: 3495) | GEC (SEQ ID NO: 3786) |
| PL- | iPS: | huGLP-1(A2G, G16E, | HGEGTFTSDVSSYLEEQAAKEFIEWLVKGGGGGGGAGGGGAGGGGAGGG | DIQMTQSPSSLSASIGDRVTIT |
| 47392 | 428032 | A24E, R30G):: | GQVQLVESGGGVVQPGRSLRLSCAASGFTFSYFGMHWVRQAPGKGLEWV | CRASQDIRDYLGWYQQKPGK |
| | | (G4A)3:: G4:: [hu | AVIWYDGSNKYYADSVKGRFTISRDNSKNTLYLQMNSLRAEDTAVYYCA | APKRLIYGASSLQSGVPSRFSG |
| | | anti-<huGIPR> 21- | RDGTIFGVLLGDYWGQGTLVTVSSASTKGPSVFPLAPSSKSTSGGTAALGC | SGSGTEFTLTISSLQPEDFATY |
| | | 143_6H1 VH3 | LVKDYFPEPVTVSWNSGALTSGVHTFPAVLQSSGLYSLSSVVTVPSSSLGT | YCLQHNNYPFTFGPGTKVDIK |
| | | VH]:: huIgG1zSEFL2-2 | QTYICNVNHKPSNTKVDKKVEPKSCDKTHTCPPCPAPELLGGPSVFLFPPKP | RTVAAPSVFIFPPSDEQLKSGT |
| | | + [Unknown anti- | KDTLMISRTPEVTCVVVDVSHEDPEVKFNWYVDGVEVHNAKTKPCEEQY | ASVVCLLNNFYPREAKVQWK |
| | | <huGIPR> 21-143_4B1 | GSTYRCVSVLTVLHQDWLNGKEYKCKVSNKALPAPIEKTISKAKGQPREP | VDNALQSGNSQESVTEQDSK |
| | | VK1 (1-236) | QVYTLPPSREEMTKNQVSLTCLVKGFYPSDIAVEWESNGQPENNYKTTPPV | DSTYSLSSTLTLSKADYEKHK |
| | | VL]:: huKLC-CL | LDSDGSFFLYSKLTVDKSRWQQGNVFSCSVMHEALHNHYTQKSLSLSPGK | VYACEVTHQGLSSPVTKSFNR |
| | | (Pepti-HC) | (SEQ ID NO: 3496) | GEC (SEQ ID NO: 3787) |
| PL- | iPS: | huGLP-1(A2S, G16E, | HSEGTFTSDVSSYLEEQAAKEFIEWLVKGGGGGGGAGGGGAGGGGAGGG | DIQMTQSPSSLSASIGDRVTIT |
| 47393 | 428033 | A24E, R30G):: | GQVQLVESGGGVVQPGRSLRLSCAASGFTFSYFGMHWVRQAPGKGLEWV | CRASQDIRDYLGWYQQKPGK |
| | | (G4A)3:: G4:: [hu | AVIWYDGSNKYYADSVKGRFTISRDNSKNTLYLQMNSLRAEDTAVYYCA | APKRLIYGASSLQSGVPSRFSG |
| | | anti-<huGIPR> 21- | RDGTIFGVLLGDYWGQGTLVTVSSASTKGPSVFPLAPSSKSTSGGTAALGC | SGSGTEFTLTISSLQPEDFATY |
| | | 143_6H1 VH3 | LVKDYFPEPVTVSWNSGALTSGVHTFPAVLQSSGLYSLSSVVTVPSSSLGT | YCLQHNNYPFTFGPGTKVDIK |
| | | VH]:: huIgG1zSEFL2-2 | QTYICNVNHKPSNTKVDKKVEPKSCDKTHTCPPCPAPELLGGPSVFLFPPKP | RTVAAPSVFIFPPSDEQLKSGT |
| | | + [Unknown anti- | KDTLMISRTPEVTCVVVDVSHEDPEVKFNWYVDGVEVHNAKTKPCEEQY | ASVVCLLNNFYPREAKVQWK |
| | | <huGIPR> 21-143_4B1 | GSTYRCVSVLTVLHQDWLNGKEYKCKVSNKALPAPIEKTISKAKGQPREP | VDNALQSGNSQESVTEQDSK |
| | | VK1 (1-236) | QVYTLPPSREEMTKNQVSLTCLVKGFYPSDIAVEWESNGQPENNYKTTPPV | DSTYSLSSTLTLSKADYEKHK |
| | | VL]:: huKLC-CL | LDSDGSFFLYSKLTVDKSRWQQGNVFSCSVMHEALHNHYTQKSLSLSPGK | VYACEVTHQGLSSPVTKSFNR |
| | | (Pepti-HC) | (SEQ ID NO: 3497) | GEC (SEQ ID NO: 3788) |
| PL- | iPS: | huGLP-1(A2S, E3Q, | HSQGTFTSDVSSYLEEQAAKEFIEWLVKGGGGGGGAGGGGAGGGGAGGG | DIQMTQSPSSLSASIGDRVTIT |
| 47394 | 428034 | G16E, A24E, R30G):: | GQVQLVESGGGVVQPGRSLRLSCAASGFTFSYFGMHWVRQAPGKGLEWV | CRASQDIRDYLGWYQQKPGK |
| | | (G4A)3:: G4:: [hu | AVIWYDGSNKYYADSVKGRFTISRDNSKNTLYLQMNSLRAEDTAVYYCA | APKRLIYGASSLQSGVPSRFSG |
| | | anti-<huGIPR> 21- | RDGTIFGVLLGDYWGQGTLVTVSSASTKGPSVFPLAPSSKSTSGGTAALGC | SGSGTEFTLTISSLQPEDFATY |
| | | 143_6H1 VH3 | LVKDYFPEPVTVSWNSGALTSGVHTFPAVLQSSGLYSLSSVVTVPSSSLGT | YCLQHNNYPFTFGPGTKVDIK |
| | | VH]:huIgG1zSEFL2-2 | QTYICNVNHKPSNTKVDKKVEPKSCDKTHTCPPCPAPELLGGPSVFLFPPKP | RTVAAPSVFIFPPSDEQLKSGT |
| | | + [Unknown anti- | KDTLMISRTPEVTCVVVDVSHEDPEVKFNWYVDGVEVHNAKTKPCEEQY | ASVVCLLNNFYPREAKVQWK |
| | | <huGIPR> 21-143_4B1 | GSTYRCVSVLTVLHQDWLNGKEYKCKVSNKALPAPIEKTISKAKGQPREP | VDNALQSGNSQESVTEQDSK |
| | | VK1 (1-236) | QVYTLPPSREEMTKNQVSLTCLVKGFYPSDIAVEWESNGQPENNYKTTPPV | DSTYSLSSTLTLSKADYEKHK |
| | | VL]:: huKLC-CL | LDSDGSFFLYSKLTVDKSRWQQGNVFSCSVMHEALHNHYTQKSLSLSPGK | VYACEVTHQGLSSPVTKSFNR |
| | | (Pepti-HC) | (SEQ ID NO: 3498) | GEC (SEQ ID NO: 3789) |
| PL- | iPS: | huGLP-1(A2G, E3D, | HGDGTFTSDVSSYLEEQAAKEFIEWLVKGGGGGGGAGGGGAGGGGAGGG | DIQMTQSPSSLSASIGDRVTIT |
| 47395 | 428035 | G16E, A24E, R30G):: | GQVQLVESGGGVVQPGRSLRLSCAASGFTFSYFGMHWVRQAPGKGLEWV | CRASQDIRDYLGWYQQKPGK |
| | | (G4A)3:: G4:: [hu | AVIWYDGSNKYYADSVKGRFTISRDNSKNTLYLQMNSLRAEDTAVYYCA | APKRLIYGASSLQSGVPSRFSG |
| | | anti-<huGIPR> 21- | RDGTIFGVLLGDYWGQGTLVTVSSASTKGPSVFPLAPSSKSTSGGTAALGC | SGSGTEFTLTISSLQPEDFATY |
| | | 143_6H1 VH3 | LVKDYFPEPVTVSWNSGALTSGVHTFPAVLQSSGLYSLSSVVTVPSSSLGT | YCLQHNNYPFTFGPGTKVDIK |
| | | VH]:huIgG1zSEFL2-2 | QTYICNVNHKPSNTKVDKKVEPKSCDKTHTCPPCPAPELLGGPSVFLFPPKP | RTVAAPSVFIFPPSDEQLKSGT |
| | | + [Unknown anti- | KDTLMISRTPEVTCVVVDVSHEDPEVKFNWYVDGVEVHNAKTKPCEEQY | ASVVCLLNNFYPREAKVQWK |
| | | <huGIPR> 21-143_4B1 | GSTYRCVSVLTVLHQDWLNGKEYKCKVSNKALPAPIEKTISKAKGQPREP | VDNALQSGNSQESVTEQDSK |
| | | VK1 (1-236) | QVYTLPPSREEMTKNQVSLTCLVKGFYPSDIAVEWESNGQPENNYKTTPPV | DSTYSLSSTLTLSKADYEKHK |
| | | VL]:: huKLC-CL | LDSDGSFFLYSKLTVDKSRWQQGNVFSCSVMHEALHNHYTQKSLSLSPGK | VYACEVTHQGLSSPVTKSFNR |
| | | (Pepti-HC) | (SEQ ID NO: 3499) | GEC (SEQ ID NO: 3790) |
| PL- | iPS: | huGLP-1(A2S, E3D, | HSDGTFTSDVSSYLEEQAAKEFIEWLVKGGGGGGGAGGGGAGGGGAGGG | DIQMTQSPSSLSASIGDRVTIT |
| 47396 | 428036 | G16E, A24E, R30G):: | GQVQLVESGGGVVQPGRSLRLSCAASGFTFSYFGMHWVRQAPGKGLEWV | CRASQDIRDYLGWYQQKPGK |
| | | (G4A)3:: G4:: [hu | AVIWYDGSNKYYADSVKGRFTISRDNSKNTLYLQMNSLRAEDTAVYYCA | APKRLIYGASSLQSGVPSRFSG |
| | | anti-<huGIPR> 21- | RDGTIFGVLLGDYWGQGTLVTVSSASTKGPSVFPLAPSSKSTSGGTAALGC | SGSGTEFTLTISSLQPEDFATY |
| | | 143_6H1 VH3 | LVKDYFPEPVTVSWNSGALTSGVHTFPAVLQSSGLYSLSSVVTVPSSSLGT | YCLQHNNYPFTFGPGTKVDIK |
| | | VH]:huIgG1zSEFL2-2 | QTYICNVNHKPSNTKVDKKVEPKSCDKTHTCPPCPAPELLGGPSVFLFPPKP | RTVAAPSVFIFPPSDEQLKSGT |
| | | + [Unknown anti- | KDTLMISRTPEVTCVVVDVSHEDPEVKFNWYVDGVEVHNAKTKPCEEQY | ASVVCLLNNFYPREAKVQWK |
| | | <huGIPR> 21-143_4B1 | GSTYRCVSVLTVLHQDWLNGKEYKCKVSNKALPAPIEKTISKAKGQPREP | VDNALQSGNSQESVTEQDSK |
| | | VK1 (1-236) | QVYTLPPSREEMTKNQVSLTCLVKGFYPSDIAVEWESNGQPENNYKTTPPV | DSTYSLSSTLTLSKADYEKHK |
| | | VL]:: huKLC-CL | LDSDGSFFLYSKLTVDKSRWQQGNVFSCSVMHEALHNHYTQKSLSLSPGK | VYACEVTHQGLSSPVTKSFNR |
| | | (Pepti-HC) | (SEQ ID NO: 3500) | GEC (SEQ ID NO: 3791) |
| PL- | iPS: | huGLP-1(A2G, G16E, | HGEGTFTSDVSSYLEEQAAKEFIAWLKNGGGGGGGAGGGGAGGGGAGGG | DIQMTQSPSSLSASIGDRVTIT |
| 47397 | 428037 | V27K, K28N, R30G):: | GQVQLVESGGGVVQPGRSLRLSCAASGFTFSYFGMHWVRQAPGKGLEWV | CRASQDIRDYLGWYQQKPGK |
| | | (G4A)3:: G4:: [hu | AVIWYDGSNKYYADSVKGRFTISRDNSKNTLYLQMNSLRAEDTAVYYCA | APKRLIYGASSLQSGVPSRFSG |
| | | anti-<huGIPR> 21- | RDGTIFGVLLGDYWGQGTLVTVSSASTKGPSVFPLAPSSKSTSGGTAALGC | SGSGTEFTLTISSLQPEDFATY |
| | | 143_6H1 VH3 | LVKDYFPEPVTVSWNSGALTSGVHTFPAVLQSSGLYSLSSVVTVPSSSLGT | YCLQHNNYPFTFGPGTKVDIK |
| | | VH]:: huIgG1zSEFL2-2 | QTYICNVNHKPSNTKVDKKVEPKSCDKTHTCPPCPAPELLGGPSVFLFPPKP | RTVAAPSVFIFPPSDEQLKSGT |
| | | + [Unknown anti- | KDTLMISRTPEVTCVVVDVSHEDPEVKFNWYVDGVEVHNAKTKPCEEQY | ASVVCLLNNFYPREAKVQWK |
| | | <huGIPR> 21-143_4B1 | GSTYRCVSVLTVLHQDWLNGKEYKCKVSNKALPAPIEKTISKAKGQPREP | VDNALQSGNSQESVTEQDSK |
| | | VK1 (1-236) | QVYTLPPSREEMTKNQVSLTCLVKGFYPSDIAVEWESNGQPENNYKTTPPV | DSTYSLSSTLTLSKADYEKHK |
| | | VL]:: huKLC-CL | LDSDGSFFLYSKLTVDKSRWQQGNVFSCSVMHEALHNHYTQKSLSLSPGK | VYACEVTHQGLSSPVTKSFNR |
| | | (Pepti-HC) | (SEQ ID NO: 3501) | GEC (SEQ ID NO: 3792) |
| PL- | iPS: | huGLP-1(A2S, G16E, | HSEGTFTSDVSSYLEEQAAKEFIAWLKNGGGGGGGAGGGGAGGGGAGGG | DIQMTQSPSSLSASIGDRVTIT |
| 47398 | 428038 | V27K, K28N, R30G):: | GQVQLVESGGGVVQPGRSLRLSCAASGFTFSYFGMHWVRQAPGKGLEWV | CRASQDIRDYLGWYQQKPGK |
| | | (G4A)3:: G4:: [hu | AVIWYDGSNKYYADSVKGRFTISRDNSKNTLYLQMNSLRAEDTAVYYCA | APKRLIYGASSLQSGVPSRFSG |
| | | anti-<huGIPR> 21- | RDGTIFGVLLGDYWGQGTLVTVSSASTKGPSVFPLAPSSKSTSGGTAALGC | SGSGTEFTLTISSLQPEDFATY |
| | | 143_6H1 VH3 | LVKDYFPEPVTVSWNSGALTSGVHTFPAVLQSSGLYSLSSVVTVPSSSLGT | YCLQHNNYPFTFGPGTKVDIK |
| | | VH]:: huIgG1zSEFL2-2 | QTYICNVNHKPSNTKVDKKVEPKSCDKTHTCPPCPAPELLGGPSVFLFPPKP | RTVAAPSVFIFPPSDEQLKSGT |
| | | + [Unknown anti- | KDTLMISRTPEVTCVVVDVSHEDPEVKFNWYVDGVEVHNAKTKPCEEQY | ASVVCLLNNFYPREAKVQWK |
| | | <huGIPR> 21-143_4B1 | GSTYRCVSVLTVLHQDWLNGKEYKCKVSNKALPAPIEKTISKAKGQPREP | VDNALQSGNSQESVTEQDSK |
| | | VK1 (1-236) | QVYTLPPSREEMTKNQVSLTCLVKGFYPSDIAVEWESNGQPENNYKTTPPV | DSTYSLSSTLTLSKADYEKHK |
| | | VL]:: huKLC-CL | LDSDGSFFLYSKLTVDKSRWQQGNVFSCSVMHEALHNHYTQKSLSLSPGK | VYACEVTHQGLSSPVTKSFNR |
| | | (Pepti-HC) | (SEQ ID NO: 3502) | GEC (SEQ ID NO: 3793) |
| PL- | iPS: | huGLP-1(A2S, E3Q, | HSQGTFTSDVSSYLEEQAAKEFIAWLKNGGGGGGGAGGGGAGGGGAGGG | DIQMTQSPSSLSASIGDRVTIT |
| 47399 | 428039 | G16E, V27K, K28N, | GQVQLVESGGGVVQPGRSLRLSCAASGFTFSYFGMHWVRQAPGKGLEWV | CRASQDIRDYLGWYQQKPGK |
| | | R30G):: (G4A)3:: G4:: | AVIWYDGSNKYYADSVKGRFTISRDNSKNTLYLQMNSLRAEDTAVYYCA | APKRLIYGASSLQSGVPSRFSG |
| | | [huanti-<huGIPR> 21- | RDGTIFGVLLGDYWGQGTLVTVSSASTKGPSVFPLAPSSKSTSGGTAALGC | SGSGTEFTLTISSLQPEDFATY |
| | | 143_6H1 VH3 | LVKDYFPEPVTVSWNSGALTSGVHTFPAVLQSSGLYSLSSVVTVPSSSLGT | YCLQHNNYPFTFGPGTKVDIK |
| | | VH]:: huIgG1zSEFL2-2 | QTYICNVNHKPSNTKVDKKVEPKSCDKTHTCPPCPAPELLGGPSVFLFPPKP | RTVAAPSVFIFPPSDEQLKSGT |
| | | + [ Unknown anti- | KDTLMISRTPEVTCVVVDVSHEDPEVKFNWYVDGVEVHNAKTKPCEEQY | ASVVCLLNNFYPREAKVQWK |
| | | <huGIPR> 21-143_4B1 | GSTYRCVSVLTVLHQDWLNGKEYKCKVSNKALPAPIEKTISKAKGQPREP | VDNALQSGNSQESVTEQDSK |
| | | VK1 (1-236) | QVYTLPPSREEMTKNQVSLTCLVKGFYPSDIAVEWESNGQPENNYKTTPPV | DSTYSLSSTLTLSKADYEKHK |
| | | VL]:: huKLC-CL | LDSDGSFFLYSKLTVDKSRWQQGNVFSCSVMHEALHNHYTQKSLSLSPGK | VYACEVTHQGLSSPVTKSFNR |
| | | (Pepti-HC) | (SEQ ID NO: 3503) | GEC (SEQ ID NO: 3794) |
| PL- | iPS: | huGLP-1(A2G, E3D, | HGDGTFTSDVSSYLEEQAAKEFIAWLKNGGGGGGGAGGGGAGGGGAGG | DIQMTQSPSSLSASIGDRVTIT |
| 47400 | 428040 | G16E, V27K, K28N, | GGQVQLVESGGGVVQPGRSLRLSCAASGFTFSYFGMHWVRQAPGKGLEW | CRASQDIRDYLGWYQQKPGK |
| | | R30G):: (G4A)3:: G4:: | VAVIWYDGSNKYYADSVKGRFTISRDNSKNTLYLQMNSLRAEDTAVYYC | APKRLIYGASSLQSGVPSRFSG |
| | | [hu anti-<huGIPR> | ARDGTIFGVLLGDYWGQGTLVTVSSASTKGPSVFPLAPSSKSTSGGTAALG | SGSGTEFTLTISSLQPEDFATY |
| | | 21-143_6H1 VH3 | CLVKDYFPEPVTVSWNSGALTSGVHTFPAVLQSSGLYSLSSVVTVPSSSLGT | YCLQHNNYPFTFGPGTKVDIK |
| | | VH]:huIgG1zSEFL2-2 | QTYICNVNHKPSNTKVDKKVEPKSCDKTHTCPPCPAPELLGGPSVFLFPPKP | RTVAAPSVFIFPPSDEQLKSGT |
| | | + [Unknown anti- | KDTLMISRTPEVTCVVVDVSHEDPEVKFNWYVDGVEVHNAKTKPCEEQY | ASVVCLLNNFYPREAKVQWK |
| | | <huGIPR> 21-143_4B1 | GSTYRCVSVLTVLHQDWLNGKEYKCKVSNKALPAPIEKTISKAKGQPREP | VDNALQSGNSQESVTEQDSK |
| | | VK1 (1-236) | QVYTLPPSREEMTKNQVSLTCLVKGFYPSDIAVEWESNGQPENNYKTTPPV | DSTYSLSSTLTLSKADYEKHK |
| | | VL]:: huKLC-CL | LDSDGSFFLYSKLTVDKSRWQQGNVFSCSVMHEALHNHYTQKSLSLSPGK | VYACEVTHQGLSSPVTKSFNR |
| | | (Pepti-HC) | (SEQ ID NO: 3504) | GEC (SEQ ID NO: 3795) |
| PL- | iPS: | huGLP-1(A2S, E3D, | HSDGTFTSDVSSYLEEQAAKEFIAWLKNGGGGGGGAGGGGAGGGGAGGG | DIQMTQSPSSLSASIGDRVTIT |
| 47401 | 428041 | G16E, V27K, K28N, | GQVQLVESGGGVVQPGRSLRLSCAASGFTFSYFGMHWVRQAPGKGLEWV | CRASQDIRDYLGWYQQKPGK |
| | | R30G):: (G4A)3:: G4:: | AVIWYDGSNKYYADSVKGRFTISRDNSKNTLYLQMNSLRAEDTAVYYCA | APKRLIYGASSLQSGVPSRFSG |
| | | [hu anti-<huGIPR> | RDGTIFGVLLGDYWGQGTLVTVSSASTKGPSVFPLAPSSKSTSGGTAALGC | SGSGTEFTLTISSLQPEDFATY |
| | | 21-143_6H1 VH3 | LVKDYFPEPVTVSWNSGALTSGVHTFPAVLQSSGLYSLSSVVTVPSSSLGT | YCLQHNNYPFTFGPGTKVDIK |
| | | VH]:: huIgG1zSEFL2-2 | QTYICNVNHKPSNTKVDKKVEPKSCDKTHTCPPCPAPELLGGPSVFLFPPKP | RTVAAPSVFIFPPSDEQLKSGT |
| | | + [Unknown anti- | KDTLMISRTPEVTCVVVDVSHEDPEVKFNWYVDGVEVHNAKTKPCEEQY | ASVVCLLNNFYPREAKVQWK |
| | | <huGIPR> 21-143_4B1 | GSTYRCVSVLTVLHQDWLNGKEYKCKVSNKALPAPIEKTISKAKGQPREP | VDNALQSGNSQESVTEQDSK |
| | | VK1 (1-236) | QVYTLPPSREEMTKNQVSLTCLVKGFYPSDIAVEWESNGQPENNYKTTPPV | DSTYSLSSTLTLSKADYEKHK |
| | | VL]:: huKLC-CL | LDSDGSFFLYSKLTVDKSRWQQGNVFSCSVMHEALHNHYTQKSLSLSPGK | VYACEVTHQGLSSPVTKSFNR |
| | | (Pepti-HC) | (SEQ ID NO: 3505) | GEC (SEQ ID NO: 3796) |
| PL- | iPS: | huGLP-1(A2G, G16E, | HGEGTFTSDVSSYLEEQAAKEFIEWLKNGGGGGGGAGGGGAGGGGAGGG | DIQMTQSPSSLSASIGDRVTIT |
| 47402 | 428042 | A24E, V27K, K28N, | GQVQLVESGGGVVQPGRSLRLSCAASGFTFSYFGMHWVRQAPGKGLEWV | CRASQDIRDYLGWYQQKPGK |
| | | R30G):: (G4A)3:: G4:: | AVIWYDGSNKYYADSVKGRFTISRDNSKNTLYLQMNSLRAEDTAVYYCA | APKRLIYGASSLQSGVPSRFSG |
| | | [hu anti-<huGIPR> | RDGTIFGVLLGDYWGQGTLVTVSSASTKGPSVFPLAPSSKSTSGGTAALGC | SGSGTEFTLTISSLQPEDFATY |
| | | 21-143_6H1 VH3 | LVKDYFPEPVTVSWNSGALTSGVHTFPAVLQSSGLYSLSSVVTVPSSSLGT | YCLQHNNYPFTFGPGTKVDIK |
| | | VH]:: huIgG1zSEFL2-2 | QTYICNVNHKPSNTKVDKKVEPKSCDKTHTCPPCPAPELLGGPSVFLFPPKP | RTVAAPSVFIFPPSDEQLKSGT |
| | | + [Unknown anti- | KDTLMISRTPEVTCVVVDVSHEDPEVKFNWYVDGVEVHNAKTKPCEEQY | ASVVCLLNNFYPREAKVQWK |
| | | <huGIPR> 21-143_4B1 | GSTYRCVSVLTVLHQDWLNGKEYKCKVSNKALPAPIEKTISKAKGQPREP | VDNALQSGNSQESVTEQDSK |
| | | VK1 (1-236) | QVYTLPPSREEMTKNQVSLTCLVKGFYPSDIAVEWESNGQPENNYKTTPPV | DSTYSLSSTLTLSKADYEKHK |
| | | VL]:: huKLC-CL | LDSDGSFFLYSKLTVDKSRWQQGNVFSCSVMHEALHNHYTQKSLSLSPGK | VYACEVTHQGLSSPVTKSFNR |
| | | (Pepti-HC) | (SEQ ID NO: 3506) | GEC (SEQ ID NO: 3797) |
| PL- | iPS: | huGLP-1(A2S, G16E, | HSEGTFTSDVSSYLEEQAAKEFIEWLKNGGGGGGGAGGGGAGGGGAGGG | DIQMTQSPSSLSASIGDRVTIT |
| 47403 | 428043 | A24E, V27K, K28N, | GQVQLVESGGGVVQPGRSLRLSCAASGFTFSYFGMHWVRQAPGKGLEWV | CRASQDIRDYLGWYQQKPGK |
| | | R30G):: (G4A)3:: G4:: | AVIWYDGSNKYYADSVKGRFTISRDNSKNTLYLQMNSLRAEDTAVYYCA | APKRLIYGASSLQSGVPSRFSG |
| | | [hu anti-<huGIPR> | RDGTIFGVLLGDYWGQGTLVTVSSASTKGPSVFPLAPSSKSTSGGTAALGC | SGSGTEFTLTISSLQPEDFATY |
| | | 21-143_6H1 VH3 | LVKDYFPEPVTVSWNSGALTSGVHTFPAVLQSSGLYSLSSVVTVPSSSLGT | YCLQHNNYPFTFGPGTKVDIK |
| | | VH]:huIgG1zSEFL2-2 | QTYICNVNHKPSNTKVDKKVEPKSCDKTHTCPPCPAPELLGGPSVFLFPPKP | RTVAAPSVFIFPPSDEQLKSGT |
| | | + [Unknown anti- | KDTLMISRTPEVTCVVVDVSHEDPEVKFNWYVDGVEVHNAKTKPCEEQY | ASVVCLLNNFYPREAKVQWK |
| | | <huGIPR> 21-143_4B1 | GSTYRCVSVLTVLHQDWLNGKEYKCKVSNKALPAPIEKTISKAKGQPREP | VDNALQSGNSQESVTEQDSK |
| | | VK1 (1-236) | QVYTLPPSREEMTKNQVSLTCLVKGFYPSDIAVEWESNGQPENNYKTTPPV | DSTYSLSSTLTLSKADYEKHK |
| | | VL]:: huKLC-CL | LDSDGSFFLYSKLTVDKSRWQQGNVFSCSVMHEALHNHYTQKSLSLSPGK | VYACEVTHQGLSSPVTKSFNR |
| | | (Pepti-HC) | (SEQ ID NO: 3507) | GEC (SEQ ID NO: 3798) |
| PL- | iPS: | huGLP-1(A2S, G16E, | HSEGTFTSDVSSYLEEQAAKEFIEWLKNGGGGGGGAGGGGAGGGGAGGG | DIQMTQSPSSLSASIGDRVTIT |
| 48489 | 428043 | A24E, V27K, K28N, | GQVQLVESGGGVVQPGRSLRLSCAASGFTFSYFGMHWVRQAPGKGLEWV | CRASQDIRDYLGWYQQKPGK |
| | | R30G):: (G4A)3:: G4:: | AVIWYDGSNKYYADSVKGRFTISRDNSKNTLYLQMNSLRAEDTAVYYCA | APKRLIYGASSLQSGVPSRFSG |
| | | [hu anti-<huGIPR> | RDGTIFGVLLGDYWGQGTLVTVSSASTKGPSVFPLAPSSKSTSGGTAALGC | SGSGTEFTLTISSLQPEDFATY |
| | | 121-43_6H1 VH3 | LVKDYFPEPVTVSWNSGALTSGVHTFPAVLQSSGLYSLSSVVTVPSSSLGT | YCLQHNNYPFTFGPGTKVDIK |
| | | VH]:: huIgG1zSEFL2-2 | QTYICNVNHKPSNTKVDKKVEPKSCDKTHTCPPCPAPELLGGPSVFLFPPKP | RTVAAPSVFIFPPSDEQLKSGT |
| | | + [Unknown anti- | KDTLMISRTPEVTCVVVDVSHEDPEVKFNWYVDGVEVHNAKTKPCEEQY | ASVVCLLNNFYPREAKVQWK |
| | | <huGIPR> 21-143_4B1 | GSTYRCVSVLTVLHQDWLNGKEYKCKVSNKALPAPIEKTISKAKGQPREP | VDNALQSGNSQESVTEQDSK |
| | | VK1 (1-236) | QVYTLPPSREEMTKNQVSLTCLVKGFYPSDIAVEWESNGQPENNYKTTPPV | DSTYSLSSTLTLSKADYEKHK |
| | | VL]:: huKLC-CL | LDSDGSFFLYSKLTVDKSRWQQGNVFSCSVMHEALHNHYTQKSLSLSPGK | VYACEVTHQGLSSPVTKSFNR |
| | | (Pepti-HC) | (SEQ ID NO: 3508) | GEC (SEQ ID NO: 3799) |
| PL- | iPS: | huGLP-1(A2S, E3Q, | HSQGTFTSDVSSYLEEQAAKEFIEWLKNGGGGGGGAGGGGAGGGGAGGG | DIQMTQSPSSLSASIGDRVTIT |
| 47404 | 428044 | G16E, A24E, V27K, | GQVQLVESGGGVVQPGRSLRLSCAASGFTFSYFGMHWVRQAPGKGLEWV | CRASQDIRDYLGWYQQKPGK |
| | | K28N, R30G):: | AVIWYDGSNKYYADSVKGRFTISRDNSKNTLYLQMNSLRAEDTAVYYCA | APKRLIYGASSLQSGVPSRFSG |
| | | (G4A)3:: G4:: [hu | RDGTIFGVLLGDYWGQGTLVTVSSASTKGPSVFPLAPSSKSTSGGTAALGC | SGSGTEFTLTISSLQPEDFATY |
| | | anti-<huGIPR> 21- | LVKDYFPEPVTVSWNSGALTSGVHTFPAVLQSSGLYSLSSVVTVPSSSLGT | YCLQHNNYPFTFGPGTKVDIK |
| | | 143_6H1 VH3 | QTYICNVNHKPSNTKVDKKVEPKSCDKTHTCPPCPAPELLGGPSVFLFPPKP | RTVAAPSVFIFPPSDEQLKSGT |
| | | VH]:: huIgG1zSEFL2-2 | KDTLMISRTPEVTCVVVDVSHEDPEVKFNWYVDGVEVHNAKTKPCEEQY | ASVVCLLNNFYPREAKVQWK |
| | | + [Unknown anti- | GSTYRCVSVLTVLHQDWLNGKEYKCKVSNKALPAPIEKTISKAKGQPREP | VDNALQSGNSQESVTEQDSK |
| | | <huGIPR> 21-143_4B1 | QVYTLPPSREEMTKNQVSLTCLVKGFYPSDIAVEWESNGQPENNYKTTPPV | DSTYSLSSTLTLSKADYEKHK |
| | | VK1 (1-236) | LDSDGSFFLYSKLTVDKSRWQQGNVFSCSVMHEALHNHYTQKSLSLSPGK | VYACEVTHQGLSSPVTKSFNR |
| | | VL]:: huKLC-CL | (SEQ ID NO: 3509) | GEC (SEQ ID NO: 3800) |
| | | (Pepti-HC) | | |
| PL- | iPS: | huGLP-1(A2G, E3D, | HGDGTFTSDVSSYLEEQAAKEFIEWLKNGGGGGGGAGGGGAG | DIQMTQSPSSLSASIGDRVTITCRASQDIR |
| 47405 | 428045 | G16E, A24E, V27K, | GGGAGGGGQVQLVESGGGVVQPGRSLRLSCAASGFTFSYFGM | DYLGWYQQKPGKAPKRLIYGASSLQSG |
| | | K28N, R30G):: | HWVRQAPGKGLEWVAVIWYDGSNKYYADSVKGRFTISRDNS | VPSRFSGSGSGTEFTLTISSLQPEDFATYY |
| | | (G4A)3:: G4:: [hu | KNTLYLQMNSLRAEDTAVYYCARDGTIFGVLLGDYWGQGTLV | CLQHNNYPFTFGPGTKVDIKRTVAAPSV |
| | | anti-<huGIPR> 21- | TVSSASTKGPSVFPLAPSSKSTSGGTAALGCLVKDYFPEPVTVS | FIFPPSDEQLKSGTASVVCLLNNFYPREA |
| | | 143_6H1 VH3 | WNSGALTSGVHTFPAVLQSSGLYSLSSVVTVPSSSLGTQTYICN | KVQWKVDNALQSGNSQESVTEQDSKDS |
| | | VH]:huIgG1zSEFL2-2 | VNHKPSNTKVDKKVEPKSCDKTHTCPPCPAPELLGGPSVFLFPP | TYSLSSTLTLSKADYEKHKVYACEVTHQ |
| | | + [Unknown anti- | KPKDTLMISRTPEVTCVVVDVSHEDPEVKFNWYVDGVEVHNA | GLSSPVTKSFNRGEC (SEQ ID NO: 3801) |
| | | <huGIPR> 21-143_4B1 | KTKPCEEQYGSTYRCVSVLTVLHQDWLNGKEYKCKVSNKALP | |
| | | VK1 (1-236) | APIEKTISKAKGQPREPQVYTLPPSREEMTKNQVSLTCLVKGFY | |
| | | VL]:: huKLC-CL | PSDIAVEWESNGQPENNYKTTPPVLDSDGSFFLYSKLTVDKSR | |
| | | (Pepti-HC) | WQQGNVFSCSVMHEALHNHYTQKSLSLSPGK (SEQ ID NO: | |
| | | | 3510) | |
| PL- | iPS: | huGLP-1(A2S, E3D, | HSDGTFTSDVSSYLEEQAAKEFIEWLKNGGGGGGGAGGGGAG | DIQMTQSPSSLSASIGDRVTITCRASQDIR |
| 47406 | 428046 | G16E, A24E, V27K, | GGGAGGGGQVQLVESGGGVVQPGRSLRLSCAASGFTFSYFGM | DYLGWYQQKPGKAPKRLIYGASSLQSG |
| | | K28N, R30G):: | HWVRQAPGKGLEWVAVIWYDGSNKYYADSVKGRFTISRDNS | VPSRFSGSGSGTEFTLTISSLQPEDFATYY |
| | | (G4A)3:: G4:: [hu | KNTLYLQMNSLRAEDTAVYYCARDGTIFGVLLGDYWGQGTLV | CLQHNNYPFTFGPGTKVDIKRTVAAPSV |
| | | anti-<huGIPR> 21- | TVSSASTKGPSVFPLAPSSKSTSGGTAALGCLVKDYFPEPVTVS | FIFPPSDEQLKSGTASVVCLLNNFYPREA |
| | | 143_6H1 VH3 | WNSGALTSGVHTFPAVLQSSGLYSLSSVVTVPSSSLGTQTYICN | KVQWKVDNALQSGNSQESVTEQDSKDS |
| | | VH]:: huIgG1zSEFL2-2 | VNHKPSNTKVDKKVEPKSCDKTHTCPPCPAPELLGGPSVFLFPP | TYSLSSTLTLSKADYEKHKVYACEVTHQ |
| | | + [Unknown anti- | KPKDTLMISRTPEVTCVVVDVSHEDPEVKFNWYVDGVEVHNA | GLSSPVTKSFNRGEC (SEQ ID NO: 3802) |
| | | <huGIPR> 21-143_4B1 | KTKPCEEQYGSTYRCVSVLTVLHQDWLNGKEYKCKVSNKALP | |
| | | VK1 (1-236) | APIEKTISKAKGQPREPQVYTLPPSREEMTKNQVSLTCLVKGFY | |
| | | VL]:: huKLC-CL | PSDIAVEWESNGQPENNYKTTPPVLDSDGSFFLYSKLTVDKSR | |
| | | (Pepti-HC) | WQQGNVFSCSVMHEALHNHYTQKSLSLSPGK (SEQ ID NO: | |
| | | | 3511) | |
| PL- | iPS: | huGLP-1(A2G, G16E, | HGEGTFTSDVSSYLEEQAAKEFIAWLVKGGGGAPAPAPAPAPA | DIQMTQSPSSLSASIGDRVTITCRASQDIR |
| 47407 | 428047 | R30G):: G:: (AP)10:: | PAPAPAPAPGQVQLVESGGGVVQPGRSLRLSCAASGFTFSYFG | DYLGWYQQKPGKAPKRLIYGASSLQSG |
| | | G:: [hu anti-<huGIPR> | MHWVRQAPGKGLEWVAVIWYDGSNKYYADSVKGRFTISRDN | VPSRFSGSGSGTEFTLTISSLQPEDFATYY |
| | | 21-143_6H1 VH3 | SKNTLYLQMNSLRAEDTAVYYCARDGTIFGVLLGDYWGQGTL | CLQHNNYPFTFGPGTKVDIKRTVAAPSV |
| | | VH]:: huIgG1zSEFL2-2 | VTVSSASTKGPSVFPLAPSSKSTSGGTAALGCLVKDYFPEPVTV | FIFPPSDEQLKSGTASVVCLLNNFYPREA |
| | | + [Unknown anti- | SWNSGALTSGVHTFPAVLQSSGLYSLSSVVTVPSSSLGTQTYIC | KVQWKVDNALQSGNSQESVTEQDSKDS |
| | | <huGIPR> 21-143_4B1 | NVNHKPSNTKVDKKVEPKSCDKTHTCPPCPAPELLGGPSVFLFP | TYSLSSTLTLSKADYEKHKVYACEVTHQ |
| | | VK1 (1-236) | PKPKDTLMISRTPEVTCVVVDVSHEDPEVKFNWYVDGVEVHN | GLSSPVTKSFNRGEC (SEQ ID NO: 3803) |
| | | VL]:: huKLC-CL | AKTKPCEEQYGSTYRCVSVLTVLHQDWLNGKEYKCKVSNKAL | |
| | | (Pepti-HC) | PAPIEKTISKAKGQPREPQVYTLPPSREEMTKNQVSLTCLVKGF | |
| | | | YPSDIAVEWESNGQPENNYKTTPPVLDSDGSFFLYSKLTVDKSR | |
| | | | WQQGNVFSCSVMHEALHNHYTQKSLSLSPGK (SEQ ID NO: | |
| | | | 3512) | |
| PL- | iPS: | huGLP-1(A2S, G16E, | HSEGTFTSDVSSYLEEQAAKEFIAWLVKGGGGAPAPAPAPAPA | DIQMTQSPSSLSASIGDRVTITCRASQDIR |
| 47408 | 428048 | R30G):: G:: (AP)10:: | PAPAPAPAPGQVQLVESGGGVVQPGRSLRLSCAASGFTFSYFG | DYLGWYQQKPGKAPKRLIYGASSLQSG |
| | | G:: [hu anti-<huGIPR> | MHWVRQAPGKGLEWVAVIWYDGSNKYYADSVKGRFTISRDN | VPSRFSGSGSGTEFTLTISSLQPEDFATYY |
| | | 21-143_6H1 VH3 | SKNTLYLQMNSLRAEDTAVYYCARDGTIFGVLLGDYWGQGTL | CLQHNNYPFTFGPGTKVDIKRTVAAPSV |
| | | VH]:: huIgG1zSEFL2-2 | VTVSSASTKGPSVFPLAPSSKSTSGGTAALGCLVKDYFPEPVTV | FIFPPSDEQLKSGTASVVCLLNNFYPREA |
| | | + [Unknown anti- | SWNSGALTSGVHTFPAVLQSSGLYSLSSVVTVPSSSLGTQTYIC | KVQWKVDNALQSGNSQESVTEQDSKDS |
| | | <huGIPR> 21-143_4B1 | NVNHKPSNTKVDKKVEPKSCDKTHTCPPCPAPELLGGPSVFLFP | TYSLSSTLTLSKADYEKHKVYACEVTHQ |
| | | VK1 (1-236) | PKPKDTLMISRTPEVTCVVVDVSHEDPEVKFNWYVDGVEVHN | GLSSPVTKSFNRGEC (SEQ ID NO: 3804) |
| | | VL]:: huKLC-CL | AKTKPCEEQYGSTYRCVSVLTVLHQDWLNGKEYKCKVSNKAL | |
| | | (Pepti-HC) | PAPIEKTISKAKGQPREPQVYTLPPSREEMTKNQVSLTCLVKGF | |
| | | | YPSDIAVEWESNGQPENNYKTTPPVLDSDGSFFLYSKLTVDKSR | |
| | | | WQQGNVFSCSVMHEALHNHYTQKSLSLSPGK (SEQ ID NO: | |
| | | | 3513) | |
| PL- | iPS: | huGLP-1(A2S, E3Q, | HSQGTFTSDVSSYLEEQAAKEFIAWLVKGGGGAPAPAPAPAPA | DIQMTQSPSSLSASIGDRVTITCRASQDIR |
| 47409 | 428049 | G16E, R30G):: | PAPAPAPAPGQVQLVESGGGVVQPGRSLRLSCAASGFTFSYFG | DYLGWYQQKPGKAPKRLIYGASSLQSG |
| | | G:: (AP)10:: G:: | MHWVRQAPGKGLEWVAVIWYDGSNKYYADSVKGRFTISRDN | VPSRFSGSGSGTEFTLTISSLQPEDFATYY |
| | | [hu anti-<huGIPR> | SKNTLYLQMNSLRAEDTAVYYCARDGTIFGVLLGDYWGQGTL | CLQHNNYPFTFGPGTKVDIKRTVAAPSV |
| | | 21-143_6H1 VH3 | VTVSSASTKGPSVFPLAPSSKSTSGGTAALGCLVKDYFPEPVTV | FIFPPSDEQLKSGTASVVCLLNNFYPREA |
| | | VH]:: huIgG1zSEFL2-2 | SWNSGALTSGVHTFPAVLQSSGLYSLSSVVTVPSSSLGTQTYIC | KVQWKVDNALQSGNSQESVTEQDSKDS |
| | | + [Unknown anti- | NVNHKPSNTKVDKKVEPKSCDKTHTCPPCPAPELLGGPSVFLFP | TYSLSSTLTLSKADYEKHKVYACEVTHQ |
| | | <huGIPR> 21-143_4B1 | PKPKDTLMISRTPEVTCVVVDVSHEDPEVKFNWYVDGVEVHN | GLSSPVTKSFNRGEC (SEQ ID NO: 3805) |
| | | VK1 (1-236) | AKTKPCEEQYGSTYRCVSVLTVLHQDWLNGKEYKCKVSNKAL | |
| | | VL]:: huKLC-CL | PAPIEKTISKAKGQPREPQVYTLPPSREEMTKNQVSLTCLVKGF | |
| | | (Pepti-HC) | YPSDIAVEWESNGQPENNYKTTPPVLDSDGSFFLYSKLTVDKSR | |
| | | | WQQGNVFSCSVMHEALHNHYTQKSLSLSPGK (SEQ ID NO: | |
| | | | 3514) | |
| PL- | iPS: | huGLP-1(A2G, E3D, | HGDGTFTSDVSSYLEEQAAKEFIAWLVKGGGGAPAPAPAPAPA | DIQMTQSPSSLSASIGDRVTITCRASQDIR |
| 47410 | 428050 | G16E, R30G):: | PAPAPAPAPGQVQLVESGGGVVQPGRSLRLSCAASGFTFSYFG | DYLGWYQQKPGKAPKRLIYGASSLQSG |
| | | G:: (AP)10:: G:: | MHWVRQAPGKGLEWVAVIWYDGSNKYYADSVKGRFTISRDN | VPSRFSGSGSGTEFTLTISSLQPEDFATYY |
| | | [hu anti-<huGIPR> | SKNTLYLQMNSLRAEDTAVYYCARDGTIFGVLLGDYWGQGTL | CLQHNNYPFTFGPGTKVDIKRTVAAPSV |
| | | 21-143_6H1 VH3 | VTVSSASTKGPSVFPLAPSSKSTSGGTAALGCLVKDYFPEPVTV | FIFPPSDEQLKSGTASVVCLLNNFYPREA |
| | | VH]:huIgG1zSEFL2-2 | SWNSGALTSGVHTFPAVLQSSGLYSLSSVVTVPSSSLGTQTYIC | KVQWKVDNALQSGNSQESVTEQDSKDS |
| | | + [Unknown anti- | NVNHKPSNTKVDKKVEPKSCDKTHTCPPCPAPELLGGPSVFLFP | TYSLSSTLTLSKADYEKHKVYACEVTHQ |
| | | <huGIPR> 21-143_4B1 | PKPKDTLMISRTPEVTCVVVDVSHEDPEVKFNWYVDGVEVHN | GLSSPVTKSFNRGEC (SEQ ID NO: 3806) |
| | | VK1 (1-236) | AKTKPCEEQYGSTYRCVSVLTVLHQDWLNGKEYKCKVSNKAL | |
| | | VL]:: huKLC-CL | PAPIEKTISKAKGQPREPQVYTLPPSREEMTKNQVSLTCLVKGF | |
| | | (Pepti-HC) | YPSDIAVEWESNGQPENNYKTTPPVLDSDGSFFLYSKLTVDKSR | |
| | | | WQQGNVFSCSVMHEALHNHYTQKSLSLSPGK (SEQ ID NO: | |
| | | | 3515) | |
| PL- | iPS: | huGLP-1(A2S, E3D, | HSDGTFTSDVSSYLEEQAAKEFIAWLVKGGGGAPAPAPAPAPA | DIQMTQSPSSLSASIGDRVTITCRASQDIR |
| 47411 | 428051 | G16E, R30G):: | PAPAPAPAPGQVQLVESGGGVVQPGRSLRLSCAASGFTFSYFG | DYLGWYQQKPGKAPKRLIYGASSLQSG |
| | | G:: (AP)10:: G:: | MHWVRQAPGKGLEWVAVIWYDGSNKYYADSVKGRFTISRDN | VPSRFSGSGSGTEFTLTISSLQPEDFATYY |
| | | [hu anti-<huGIPR> | SKNTLYLQMNSLRAEDTAVYYCARDGTIFGVLLGDYWGQGTL | CLQHNNYPFTFGPGTKVDIKRTVAAPSV |
| | | 21-143_6H1 VH3 | VTVSSASTKGPSVFPLAPSSKSTSGGTAALGCLVKDYFPEPVTV | FIFPPSDEQLKSGTASVVCLLNNFYPREA |
| | | VH]:: huIgG1zSEFL2-2 | SWNSGALTSGVHTFPAVLQSSGLYSLSSVVTVPSSSLGTQTYIC | KVQWKVDNALQSGNSQESVTEQDSKDS |
| | | + [Unknown anti- | NVNHKPSNTKVDKKVEPKSCDKTHTCPPCPAPELLGGPSVFLFP | TYSLSSTLTLSKADYEKHKVYACEVTHQ |
| | | <huGIPR> 21-143_4B1 | PKPKDTLMISRTPEVTCVVVDVSHEDPEVKFNWYVDGVEVHN | GLSSPVTKSFNRGEC (SEQ ID NO: 3807) |
| | | VK1 (1-236) | AKTKPCEEQYGSTYRCVSVLTVLHQDWLNGKEYKCKVSNKAL | |
| | | VL]:: huKLC-CL | PAPIEKTISKAKGQPREPQVYTLPPSREEMTKNQVSLTCLVKGF | |
| | | (Pepti-HC) | YPSDIAVEWESNGQPENNYKTTPPVLDSDGSFFLYSKLTVDKSR | |
| | | | WQQGNVFSCSVMHEALHNHYTQKSLSLSPGK (SEQ ID NO: | |
| | | | 3516) | |
| PL- | iPS: | huGLP-1(A2G, G16E, | HGEGTFTSDVSSYLEEQAAKEFIEWLVKGGGGAPAPAPAPAPA | DIQMTQSPSSLSASIGDRVTITCRASQDIR |
| 47412 | 428052 | A24E, R30G):: | PAPAPAPAPGQVQLVESGGGVVQPGRSLRLSCAASGFTFSYFG | DYLGWYQQKPGKAPKRLIYGASSLQSG |
| | | G:: (AP)10:: G:: | MHWVRQAPGKGLEWVAVIWYDGSNKYYADSVKGRFTISRDN | VPSRFSGSGSGTEFTLTISSLQPEDFATYY |
| | | [hu anti-<huGIPR> | SKNTLYLQMNSLRAEDTAVYYCARDGTIFGVLLGDYWGQGTL | CLQHNNYPFTFGPGTKVDIKRTVAAPSV |
| | | 21-143_6H1 VH3 | VTVSSASTKGPSVFPLAPSSKSTSGGTAALGCLVKDYFPEPVTV | FIFPPSDEQLKSGTASVVCLLNNFYPREA |
| | | VH]:: huIgG1zSEFL2-2 | SWNSGALTSGVHTFPAVLQSSGLYSLSSVVTVPSSSLGTQTYIC | KVQWKVDNALQSGNSQESVTEQDSKDS |
| | | + [Unknown anti- | NVNHKPSNTKVDKKVEPKSCDKTHTCPPCPAPELLGGPSVFLFP | TYSLSSTLTLSKADYEKHKVYACEVTHQ |
| | | <huGIPR> 21-143_4B1 | PKPKDTLMISRTPEVTCVVVDVSHEDPEVKFNWYVDGVEVHN | GLSSPVTKSFNRGEC (SEQ ID NO: 3808) |
| | | VK1 (1-236) | AKTKPCEEQYGSTYRCVSVLTVLHQDWLNGKEYKCKVSNKAL | |
| | | VL]:: huKLC-CL | PAPIEKTISKAKGQPREPQVYTLPPSREEMTKNQVSLTCLVKGF | |
| | | (Pepti-HC) | YPSDIAVEWESNGQPENNYKTTPPVLDSDGSFFLYSKLTVDKSR | |
| | | | WQQGNVFSCSVMHEALHNHYTQKSLSLSPGK (SEQ ID NO: | |
| | | | 3517) | |
| PL- | iPS: | huGLP-1(A2S, G16E, | HSEGTFTSDVSSYLEEQAAKEFIEWLVKGGGGAPAPAPAPAPAP | DIQMTQSPSSLSASIGDRVTITCRASQDIR |
| 47413 | 428053 | A24E, R30G):: | APAPAPAPGQVQLVESGGGVVQPGRSLRLSCAASGFTFSYFGM | DYLGWYQQKPGKAPKRLIYGASSLQSG |
| | | G:: (AP)10:: G:: | HWVRQAPGKGLEWVAVIWYDGSNKYYADSVKGRFTISRDNS | VPSRFSGSGSGTEFTLTISSLQPEDFATYY |
| | | [hu anti-<huGIPR> | KNTLYLQMNSLRAEDTAVYYCARDGTIFGVLLGDYWGQGTLV | CLQHNNYPFTFGPGTKVDIKRTVAAPSV |
| | | 21-143_6H1 VH3 | TVSSASTKGPSVFPLAPSSKSTSGGTAALGCLVKDYFPEPVTVS | FIFPPSDEQLKSGTASVVCLLNNFYPREA |
| | | VH]:huIgG1zSEFL2-2 | WNSGALTSGVHTFPAVLQSSGLYSLSSVVTVPSSSLGTQTYICN | KVQWKVDNALQSGNSQESVTEQDSKDS |
| | | + [Unknown anti- | VNHKPSNTKVDKKVEPKSCDKTHTCPPCPAPELLGGPSVFLFPP | TYSLSSTLTLSKADYEKHKVYACEVTHQ |
| | | <huGIPR> 21-143_4B1 | KPKDTLMISRTPEVTCVVVDVSHEDPEVKFNWYVDGVEVHNA | GLSSPVTKSFNRGEC (SEQ ID NO: 3809) |
| | | VK1 (1-236) | KTKPCEEQYGSTYRCVSVLTVLHQDWLNGKEYKCKVSNKALP | |
| | | VL]:: huKLC-CL | APIEKTISKAKGQPREPQVYTLPPSREEMTKNQVSLTCLVKGFY | |
| | | (Pepti-HC) | PSDIAVEWESNGQPENNYKTTPPVLDSDGSFFLYSKLTVDKSR | |
| | | | WQQGNVFSCSVMHEALHNHYTQKSLSLSPGK (SEQ ID NO: | |
| | | | 3518) | |
| PL- | iPS: | huGLP-1(A2S, E3Q, | HSQGTFTSDVSSYLEEQAAKEFIEWLVKGGGGAPAPAPAPAPA | DIQMTQSPSSLSASIGDRVTITCRASQDIR |
| 47414 | 428054 | G16E, A24E, R30G):: | PAPAPAPAPGQVQLVESGGGVVQPGRSLRLSCAASGFTFSYFG | DYLGWYQQKPGKAPKRLIYGASSLQSG |
| | | G:: (AP)10:: G:: | MHWVRQAPGKGLEWVAVIWYDGSNKYYADSVKGRFTISRDN | VPSRFSGSGSGTEFTLTISSLQPEDFATYY |
| | | [hu anti-<huGIPR> | SKNTLYLQMNSLRAEDTAVYYCARDGTIFGVLLGDYWGQGTL | CLQHNNYPFTFGPGTKVDIKRTVAAPSV |
| | | 21-143_6H1 VH3 | VTVSSASTKGPSVFPLAPSSKSTSGGTAALGCLVKDYFPEPVTV | FIFPPSDEQLKSGTASVVCLLNNFYPREA |
| | | VH]:: huIgG1zSEFL2-2 | SWNSGALTSGVHTFPAVLQSSGLYSLSSVVTVPSSSLGTQTYIC | KVQWKVDNALQSGNSQESVTEQDSKDS |
| | | + [Unknown anti- | NVNHKPSNTKVDKKVEPKSCDKTHTCPPCPAPELLGGPSVFLFP | TYSLSSTLTLSKADYEKHKVYACEVTHQ |
| | | <huGIPR> 21-143_4B1 | PKPKDTLMISRTPEVTCVVVDVSHEDPEVKFNWYVDGVEVHN | GLSSPVTKSFNRGEC (SEQ ID NO: 3810) |
| | | VK1 (1-236) | AKTKPCEEQYGSTYRCVSVLTVLHQDWLNGKEYKCKVSNKAL | |
| | | VL]:: huKLC-CL | PAPIEKTISKAKGQPREPQVYTLPPSREEMTKNQVSLTCLVKGF | |
| | | (Pepti-HC) | YPSDIAVEWESNGQPENNYKTTPPVLDSDGSFFLYSKLTVDKSR | |
| | | | WQQGNVFSCSVMHEALHNHYTQKSLSLSPGK (SEQ ID NO: | |
| | | | 3519) | |
| PL- | iPS: | huGLP-1(A2G, E3D, | HGDGTFTSDVSSYLEEQAAKEFIEWLVKGGGGAPAPAPAPAPA | DIQMTQSPSSLSASIGDRVTITCRASQDIR |
| 47415 | 428055 | G16E, A24E, R30G):: | PAPAPAPAPGQVQLVESGGGVVQPGRSLRLSCAASGFTFSYFG | DYLGWYQQKPGKAPKRLIYGASSLQSG |
| | | G:: (AP)10:: G:: | MHWVRQAPGKGLEWVAVIWYDGSNKYYADSVKGRFTISRDN | VPSRFSGSGSGTEFTLTISSLQPEDFATYY |
| | | [hu anti-<huGIPR> | SKNTLYLQMNSLRAEDTAVYYCARDGTIFGVLLGDYWGQGTL | CLQHNNYPFTFGPGTKVDIKRTVAAPSV |
| | | 21-143_6H1 VH3 | VTVSSASTKGPSVFPLAPSSKSTSGGTAALGCLVKDYFPEPVTV | FIFPPSDEQLKSGTASVVCLLNNFYPREA |
| | | VH]:: huIgG1zSEFL2-2 | SWNSGALTSGVHTFPAVLQSSGLYSLSSVVTVPSSSLGTQTYIC | KVQWKVDNALQSGNSQESVTEQDSKDS |
| | | + [Unknown anti- | NVNHKPSNTKVDKKVEPKSCDKTHTCPPCPAPELLGGPSVFLFP | TYSLSSTLTLSKADYEKHKVYACEVTHQ |
| | | <huGIPR> 21-143_4B1 | PKPKDTLMISRTPEVTCVVVDVSHEDPEVKFNWYVDGVEVHN | GLSSPVTKSFNRGEC (SEQ ID NO: 3811) |
| | | VK1 (1-236) | AKTKPCEEQYGSTYRCVSVLTVLHQDWLNGKEYKCKVSNKAL | |
| | | VL]:: huKLC-CL | PAPIEKTISKAKGQPREPQVYTLPPSREEMTKNQVSLTCLVKGF | |
| | | (Pepti-HC) | YPSDIAVEWESNGQPENNYKTTPPVLDSDGSFFLYSKLTVDKSR | |
| | | | WQQGNVFSCSVMHEALHNHYTQKSLSLSPGK (SEQ ID NO: | |
| | | | 3520) | |
| PL- | iPS: | huGLP-1(A2S, E3D, | HSDGTFTSDVSSYLEEQAAKEFIEWLVKGGGGAPAPAPAPAPA | DIQMTQSPSSLSASIGDRVTITCRASQDIR |
| 47416 | 428056 | G16E, A24E, R30G):: | PAPAPAPAPGQVQLVESGGGVVQPGRSLRLSCAASGFTFSYFG | DYLGWYQQKPGKAPKRLIYGASSLQSG |
| | | G:: (AP)10:: G:: | MHWVRQAPGKGLEWVAVIWYDGSNKYYADSVKGRFTISRDN | VPSRFSGSGSGTEFTLTISSLQPEDFATYY |
| | | [hu anti-<huGIPR> | SKNTLYLQMNSLRAEDTAVYYCARDGTIFGVLLGDYWGQGTL | CLQHNNYPFTFGPGTKVDIKRTVAAPSV |
| | | 21-143_6H1 VH3 | VTVSSASTKGPSVFPLAPSSKSTSGGTAALGCLVKDYFPEPVTV | FIFPPSDEQLKSGTASVVCLLNNFYPREA |
| | | VH]:huIgG1zSEFL2-2 | SWNSGALTSGVHTFPAVLQSSGLYSLSSVVTVPSSSLGTQTYIC | KVQWKVDNALQSGNSQESVTEQDSKDS |
| | | + [Unknown anti- | NVNHKPSNTKVDKKVEPKSCDKTHTCPPCPAPELLGGPSVFLFP | TYSLSSTLTLSKADYEKHKVYACEVTHQ |
| | | <huGIPR> 21-143_4B1 | PKPKDTLMISRTPEVTCVVVDVSHEDPEVKFNWYVDGVEVHN | GLSSPVTKSFNRGEC (SEQ ID NO: 3812) |
| | | VK1 (1-236) | AKTKPCEEQYGSTYRCVSVLTVLHQDWLNGKEYKCKVSNKAL | |
| | | VL]:: huKLC-CL | PAPIEKTISKAKGQPREPQVYTLPPSREEMTKNQVSLTCLVKGF | |
| | | (Pepti-HC) | YPSDIAVEWESNGQPENNYKTTPPVLDSDGSFFLYSKLTVDKSR | |
| | | | WQQGNVFSCSVMHEALHNHYTQKSLSLSPGK (SEQ ID NO: | |
| | | | 3521) | |
| PL- | iPS: | huGLP-1(A2G, G16E, | HGEGTFTSDVSSYLEEQAAKEFIAWLKNGGGGAPAPAPAPAPA | DIQMTQSPSSLSASIGDRVTITCRASQDIR |
| 47417 | 428057 | V27K, K28N, R30G):: | PAPAPAPAPGQVQLVESGGGVVQPGRSLRLSCAASGFTFSYFG | DYLGWYQQKPGKAPKRLIYGASSLQSG |
| | | G:: (AP)10:: G:: | MHWVRQAPGKGLEWVAVIWYDGSNKYYADSVKGRFTISRDN | VPSRFSGSGSGTEFTLTISSLQPEDFATYY |
| | | [hu anti-<huGIPR> | SKNTLYLQMNSLRAEDTAVYYCARDGTIFGVLLGDYWGQGTL | CLQHNNYPFTFGPGTKVDIKRTVAAPSV |
| | | 21-143_6H1 VH3 | VTVSSASTKGPSVFPLAPSSKSTSGGTAALGCLVKDYFPEPVTV | FIFPPSDEQLKSGTASVVCLLNNFYPREA |
| | | VH]:: huIgG1zSEFL2-2 | SWNSGALTSGVHTFPAVLQSSGLYSLSSVVTVPSSSLGTQTYIC | KVQWKVDNALQSGNSQESVTEQDSKDS |
| | | + [Unknown anti- | NVNHKPSNTKVDKKVEPKSCDKTHTCPPCPAPELLGGPSVFLFP | TYSLSSTLTLSKADYEKHKVYACEVTHQ |
| | | <huGIPR> 21-143_4B1 | PKPKDTLMISRTPEVTCVVVDVSHEDPEVKFNWYVDGVEVHN | GLSSPVTKSFNRGEC (SEQ ID NO: 3813) |
| | | VK1 (1-236) | AKTKPCEEQYGSTYRCVSVLTVLHQDWLNGKEYKCKVSNKAL | |
| | | VL]:: huKLC-CL | PAPIEKTISKAKGQPREPQVYTLPPSREEMTKNQVSLTCLVKGF | |
| | | (Pepti-HC) | YPSDIAVEWESNGQPENNYKTTPPVLDSDGSFFLYSKLTVDKSR | |
| | | | WQQGNVFSCSVMHEALHNHYTQKSLSLSPGK (SEQ ID NO: | |
| | | | 3522) | |
| PL- | iPS: | huGLP-1(A2S, G16E, | HSEGTFTSDVSSYLEEQAAKEFIAWLKNGGGGAPAPAPAPAPA | DIQMTQSPSSLSASIGDRVTITCRASQDIR |
| 47418 | 428058 | V27K, K28N, R30G):: | PAPAPAPAPGQVQLVESGGGVVQPGRSLRLSCAASGFTFSYFG | DYLGWYQQKPGKAPKRLIYGASSLQSG |
| | | G:: (AP)10:: G:: | MHWVRQAPGKGLEWVAVIWYDGSNKYYADSVKGRFTISRDN | VPSRFSGSGSGTEFTLTISSLQPEDFATYY |
| | | [hu anti-<huGIPR> | SKNTLYLQMNSLRAEDTAVYYCARDGTIFGVLLGDYWGQGTL | CLQHNNYPFTFGPGTKVDIKRTVAAPSV |
| | | 21-143_6H1 VH3 | VTVSSASTKGPSVFPLAPSSKSTSGGTAALGCLVKDYFPEPVTV | FIFPPSDEQLKSGTASVVCLLNNFYPREA |
| | | VH]:: huIgG1zSEFL2-2 | SWNSGALTSGVHTFPAVLQSSGLYSLSSVVTVPSSSLGTQTYIC | KVQWKVDNALQSGNSQESVTEQDSKDS |
| | | + [Unknown anti- | NVNHKPSNTKVDKKVEPKSCDKTHTCPPCPAPELLGGPSVFLFP | TYSLSSTLTLSKADYEKHKVYACEVTHQ |
| | | <huGIPR> 21-143_4B1 | PKPKDTLMISRTPEVTCVVVDVSHEDPEVKFNWYVDGVEVHN | GLSSPVTKSFNRGEC (SEQ ID NO: 3814) |
| | | VK1 (1-236) | AKTKPCEEQYGSTYRCVSVLTVLHQDWLNGKEYKCKVSNKAL | |
| | | VL]:: huKLC-CL | PAPIEKTISKAKGQPREPQVYTLPPSREEMTKNQVSLTCLVKGF | |
| | | (Pepti-HC) | YPSDIAVEWESNGQPENNYKTTPPVLDSDGSFFLYSKLTVDKSR | |
| | | | WQQGNVFSCSVMHEALHNHYTQKSLSLSPGK (SEQ ID NO: | |
| | | | 3523) | |
| PL- | iPS: | huGLP-1(A2S, E3Q, | HSQGTFTSDVSSYLEEQAAKEFIAWLKNGGGGAPAPAPAPAPA | DIQMTQSPSSLSASIGDRVTITCRASQDIR |
| 47419 | 428059 | G16E, V27K, K28N, | PAPAPAPAPGQVQLVESGGGVVQPGRSLRLSCAASGFTFSYFG | DYLGWYQQKPGKAPKRLIYGASSLQSG |
| | | R30G):: G:: (AP)10:: | MHWVRQAPGKGLEWVAVIWYDGSNKYYADSVKGRFTISRDN | VPSRFSGSGSGTEFTLTISSLQPEDFATYY |
| | | G:: [hu anti-<huGIPR> | SKNTLYLQMNSLRAEDTAVYYCARDGTIFGVLLGDYWGQGTL | CLQHNNYPFTFGPGTKVDIKRTVAAPSV |
| | | 21-143_6H1 VH3 | VTVSSASTKGPSVFPLAPSSKSTSGGTAALGCLVKDYFPEPVTV | FIFPPSDEQLKSGTASVVCLLNNFYPREA |
| | | VH]:: huIgG1zSEFL2-2 | SWNSGALTSGVHTFPAVLQSSGLYSLSSVVTVPSSSLGTQTYIC | KVQWKVDNALQSGNSQESVTEQDSKDS |
| | | + [Unknown anti- | NVNHKPSNTKVDKKVEPKSCDKTHTCPPCPAPELLGGPSVFLFP | TYSLSSTLTLSKADYEKHKVYACEVTHQ |
| | | <huGIPR> 21-143_4B1 | PKPKDTLMISRTPEVTCVVVDVSHEDPEVKFNWYVDGVEVHN | GLSSPVTKSFNRGEC (SEQ ID NO: 3815) |
| | | VK1 (1-236) | AKTKPCEEQYGSTYRCVSVLTVLHQDWLNGKEYKCKVSNKAL | |
| | | VL]:: huKLC-CL | PAPIEKTISKAKGQPREPQVYTLPPSREEMTKNQVSLTCLVKGF | |
| | | (Pepti-HC) | YPSDIAVEWESNGQPENNYKTTPPVLDSDGSFFLYSKLTVDKSR | |
| | | | WQQGNVFSCSVMHEALHNHYTQKSLSLSPGK (SEQ ID NO: | |
| | | | 3524) | |
| PL- | iPS: | huGLP-1(A2G, E3D, | HGDGTFTSDVSSYLEEQAAKEFIAWLKNGGGGAPAPAPAPAPA | DIQMTQSPSSLSASIGDRVTITCRASQDIR |
| 47420 | 428060 | G16E, V27K, K28N, | PAPAPAPAPGQVQLVESGGGVVQPGRSLRLSCAASGFTFSYFG | DYLGWYQQKPGKAPKRLIYGASSLQSG |
| | | R30G):: G:: (AP)10:: | MHWVRQAPGKGLEWVAVIWYDGSNKYYADSVKGRFTISRDN | VPSRFSGSGSGTEFTLTISSLQPEDFATYY |
| | | G:: [hu anti-<huGIPR> | SKNTLYLQMNSLRAEDTAVYYCARDGTIFGVLLGDYWGQGTL | CLQHNNYPFTFGPGTKVDIKRTVAAPSV |
| | | 21-143_6H1 VH3 | VTVSSASTKGPSVFPLAPSSKSTSGGTAALGCLVKDYFPEPVTV | FIFPPSDEQLKSGTASVVCLLNNFYPREA |
| | | VH]:: huIgG1zSEFL2-2 | SWNSGALTSGVHTFPAVLQSSGLYSLSSVVTVPSSSLGTQTYIC | KVQWKVDNALQSGNSQESVTEQDSKDS |
| | | + [Unknown anti- | NVNHKPSNTKVDKKVEPKSCDKTHTCPPCPAPELLGGPSVFLFP | TYSLSSTLTLSKADYEKHKVYACEVTHQ |
| | | <huGIPR> 21-143_4B1 | PKPKDTLMISRTPEVTCVVVDVSHEDPEVKFNWYVDGVEVHN | GLSSPVTKSFNRGEC (SEQ ID NO: 3816) |
| | | VK1 (1-236) | AKTKPCEEQYGSTYRCVSVLTVLHQDWLNGKEYKCKVSNKAL | |
| | | VL]:: huKLC-CL | PAPIEKTISKAKGQPREPQVYTLPPSREEMTKNQVSLTCLVKGF | |
| | | (Pepti-HC) | YPSDIAVEWESNGQPENNYKTTPPVLDSDGSFFLYSKLTVDKSR | |
| | | | WQQGNVFSCSVMHEALHNHYTQKSLSLSPGK (SEQ ID NO: | |
| | | | 3525) | |
| PL- | iPS: | huGLP-1(A2S, E3D, | HSDGTFTSDVSSYLEEQAAKEFIAWLKNGGGGAPAPAPAPAPA | DIQMTQSPSSLSASIGDRVTITCRASQDIR |
| 47421 | 428061 | G16E, V27K, K28N, | PAPAPAPAPGQVQLVESGGGVVQPGRSLRLSCAASGFTFSYFG | DYLGWYQQKPGKAPKRLIYGASSLQSG |
| | | R30G):: G:: (AP)10:: | MHWVRQAPGKGLEWVAVIWYDGSNKYYADSVKGRFTISRDN | VPSRFSGSGSGTEFTLTISSLQPEDFATYY |
| | | G:: [hu anti-<huGIPR> | SKNTLYLQMNSLRAEDTAVYYCARDGTIFGVLLGDYWGQGTL | CLQHNNYPFTFGPGTKVDIKRTVAAPSV |
| | | 21-143_6H1 VH3 | VTVSSASTKGPSVFPLAPSSKSTSGGTAALGCLVKDYFPEPVTV | FIFPPSDEQLKSGTASVVCLLNNFYPREA |
| | | VH]:: huIgG1zSEFL2-2 | SWNSGALTSGVHTFPAVLQSSGLYSLSSVVTVPSSSLGTQTYIC | KVQWKVDNALQSGNSQESVTEQDSKDS |
| | | + [Unknown anti- | NVNHKPSNTKVDKKVEPKSCDKTHTCPPCPAPELLGGPSVFLFP | TYSLSSTLTLSKADYEKHKVYACEVTHQ |
| | | <huGIPR> 21-143_4B1 | PKPKDTLMISRTPEVTCVVVDVSHEDPEVKFNWYVDGVEVHN | GLSSPVTKSFNRGEC (SEQ ID NO: 3817) |
| | | VK1 (1-236) | AKTKPCEEQYGSTYRCVSVLTVLHQDWLNGKEYKCKVSNKAL | |
| | | VL]:: huKLC-CL | PAPIEKTISKAKGQPREPQVYTLPPSREEMTKNQVSLTCLVKGF | |
| | | (Pepti-HC) | YPSDIAVEWESNGQPENNYKTTPPVLDSDGSFFLYSKLTVDKSR | |
| | | | WQQGNVFSCSVMHEALHNHYTQKSLSLSPGK (SEQ ID NO: | |
| | | | 3526) | |
| PL- | iPS: | huGLP-1(A2G, G16E, | HGEGTFTSDVSSYLEEQAAKEFIEWLKNGGGGAPAPAPAPAPA | DIQMTQSPSSLSASIGDRVTITCRASQDIR |
| 47422 | 428062 | A24E, V27K, K28N, | PAPAPAPAPGQVQLVESGGGVVQPGRSLRLSCAASGFTFSYFG | DYLGWYQQKPGKAPKRLIYGASSLQSG |
| | | R30G):: G:: (AP)10:: | MHWVRQAPGKGLEWVAVIWYDGSNKYYADSVKGRFTISRDN | VPSRFSGSGSGTEFTLTISSLQPEDFATYY |
| | | G:: [hu anti-<huGIPR> | SKNTLYLQMNSLRAEDTAVYYCARDGTIFGVLLGDYWGQGTL | CLQHNNYPFTFGPGTKVDIKRTVAAPSV |
| | | 21-143_6H1 VH3 | VTVSSASTKGPSVFPLAPSSKSTSGGTAALGCLVKDYFPEPVTV | FIFPPSDEQLKSGTASVVCLLNNFYPREA |
| | | VH]:huIgG1zSEFL2-2 | SWNSGALTSGVHTFPAVLQSSGLYSLSSVVTVPSSSLGTQTYIC | KVQWKVDNALQSGNSQESVTEQDSKDS |
| | | + [Unknown anti- | NVNHKPSNTKVDKKVEPKSCDKTHTCPPCPAPELLGGPSVFLFP | TYSLSSTLTLSKADYEKHKVYACEVTHQ |
| | | <huGIPR> 21-143_4B1 | PKPKDTLMISRTPEVTCVVVDVSHEDPEVKFNWYVDGVEVHN | GLSSPVTKSFNRGEC (SEQ ID NO: 3818) |
| | | VK1 (1-236) | AKTKPCEEQYGSTYRCVSVLTVLHQDWLNGKEYKCKVSNKAL | |
| | | VL]:: huKLC-CL | PAPIEKTISKAKGQPREPQVYTLPPSREEMTKNQVSLTCLVKGF | |
| | | (Pepti-HC) | YPSDIAVEWESNGQPENNYKTTPPVLDSDGSFFLYSKLTVDKSR | |
| | | | WQQGNVFSCSVMHEALHNHYTQKSLSLSPGK (SEQ ID NO: | |
| | | | 3527) | |
| PL- | iPS: | huGLP-1(A2S, G16E, | HSEGTFTSDVSSYLEEQAAKEFIEWLKNGGGGAPAPAPAPAPAP | DIQMTQSPSSLSASIGDRVTITCRASQDIR |
| 47423 | 428063 | A24E, V27K, K28N, | APAPAPAPGQVQLVESGGGVVQPGRSLRLSCAASGFTFSYFGM | DYLGWYQQKPGKAPKRLIYGASSLQSG |
| | | R30G):: G:: (AP)10:: | HWVRQAPGKGLEWVAVIWYDGSNKYYADSVKGRFTISRDNS | VPSRFSGSGSGTEFTLTISSLQPEDFATYY |
| | | G:: [hu anti-<huGIPR> | KNTLYLQMNSLRAEDTAVYYCARDGTIFGVLLGDYWGQGTLV | CLQHNNYPFTFGPGTKVDIKRTVAAPSV |
| | | 21-143_6H1 VH3 | TVSSASTKGPSVFPLAPSSKSTSGGTAALGCLVKDYFPEPVTVS | FIFPPSDEQLKSGTASVVCLLNNFYPREA |
| | | VH]:: huIgG1zSEFL2-2 | WNSGALTSGVHTFPAVLQSSGLYSLSSVVTVPSSSLGTQTYICN | KVQWKVDNALQSGNSQESVTEQDSKDS |
| | | + [Unknown anti- | VNHKPSNTKVDKKVEPKSCDKTHTCPPCPAPELLGGPSVFLFPP | TYSLSSTLTLSKADYEKHKVYACEVTHQ |
| | | <huGIPR> 21-143_4B1 | KPKDTLMISRTPEVTCVVVDVSHEDPEVKFNWYVDGVEVHNA | GLSSPVTKSFNRGEC (SEQ ID NO: 3819) |
| | | VK1 (1-236) | KTKPCEEQYGSTYRCVSVLTVLHQDWLNGKEYKCKVSNKALP | |
| | | VL]:: huKLC-CL | APIEKTISKAKGQPREPQVYTLPPSREEMTKNQVSLTCLVKGFY | |
| | | (Pepti-HC) | PSDIAVEWESNGQPENNYKTTPPVLDSDGSFFLYSKLTVDKSR | |
| | | | WQQGNVFSCSVMHEALHNHYTQKSLSLSPGK (SEQ ID NO: | |
| | | | 3528) | |
| PL- | iPS: | huGLP-1(A2S, G16E, | HSEGTFTSDVSSYLEEQAAKEFIEWLKNGGGGAPAPAPAPAPAP | DIQMTQSPSSLSASIGDRVTITCRASQDIR |
| 48490 | 428063 | A24E, V27K, K28N, | APAPAPAPGQVQLVESGGGVVQPGRSLRLSCAASGFTFSYFGM | DYLGWYQQKPGKAPKRLIYGASSLQSG |
| | | R30G):: G:: (AP)10:: | HWVRQAPGKGLEWVAVIWYDGSNKYYADSVKGRFTISRDNS | VPSRFSGSGSGTEFTLTISSLQPEDFATYY |
| | | G:: [hu anti-<huGIPR> | KNTLYLQMNSLRAEDTAVYYCARDGTIFGVLLGDYWGQGTLV | CLQHNNYPFTFGPGTKVDIKRTVAAPSV |
| | | 21-143_6H1 VH3 | TVSSASTKGPSVFPLAPSSKSTSGGTAALGCLVKDYFPEPVTVS | FIFPPSDEQLKSGTASVVCLLNNFYPREA |
| | | VH]:: huIgG1zSEFL2-2 | WNSGALTSGVHTFPAVLQSSGLYSLSSVVTVPSSSLGTQTYICN | KVQWKVDNALQSGNSQESVTEQDSKDS |
| | | + [Unknown anti- | VNHKPSNTKVDKKVEPKSCDKTHTCPPCPAPELLGGPSVFLFPP | TYSLSSTLTLSKADYEKHKVYACEVTHQ |
| | | <huGIPR> 21-143_4B1 | KPKDTLMISRTPEVTCVVVDVSHEDPEVKFNWYVDGVEVHNA | GLSSPVTKSFNRGEC (SEQ ID NO: 3820) |
| | | VK1 (1-236) | KTKPCEEQYGSTYRCVSVLTVLHQDWLNGKEYKCKVSNKALP | |
| | | VL]:: huKLC-CL | APIEKTISKAKGQPREPQVYTLPPSREEMTKNQVSLTCLVKGFY | |
| | | (Pepti-HC) | PSDIAVEWESNGQPENNYKTTPPVLDSDGSFFLYSKLTVDKSR | |
| | | | WQQGNVFSCSVMHEALHNHYTQKSLSLSPGK (SEQ ID NO: | |
| | | | 3529) | |
| PL- | iPS: | huGLP-1(A2S, E3Q, | HSQGTFTSDVSSYLEEQAAKEFIEWLKNGGGGAPAPAPAPAPA | DIQMTQSPSSLSASIGDRVTITCRASQDIR |
| 47424 | 428064 | G16E, A24E, V27K, | PAPAPAPAPGQVQLVESGGGVVQPGRSLRLSCAASGFTFSYFG | DYLGWYQQKPGKAPKRLIYGASSLQSG |
| | | K28N, R30G):: | MHWVRQAPGKGLEWVAVIWYDGSNKYYADSVKGRFTISRDN | VPSRFSGSGSGTEFTLTISSLQPEDFATYY |
| | | G:: (AP) 10:: G:: | SKNTLYLQMNSLRAEDTAVYYCARDGTIFGVLLGDYWGQGTL | CLQHNNYPFTFGPGTKVDIKRTVAAPSV |
| | | [hu anti-<huGIPR> | VTVSSASTKGPSVFPLAPSSKSTSGGTAALGCLVKDYFPEPVTV | FIFPPSDEQLKSGTASVVCLLNNFYPREA |
| | | 21-143_6H1 VH3 | SWNSGALTSGVHTFPAVLQSSGLYSLSSVVTVPSSSLGTQTYIC | KVQWKVDNALQSGNSQESVTEQDSKDS |
| | | VH]:: huIgG1zSEFL2-2 | NVNHKPSNTKVDKKVEPKSCDKTHTCPPCPAPELLGGPSVFLFP | TYSLSSTLTLSKADYEKHKVYACEVTHQ |
| | | + [Unknown anti- | PKPKDTLMISRTPEVTCVVVDVSHEDPEVKFNWYVDGVEVHN | GLSSPVTKSFNRGEC (SEQ ID NO: 3821) |
| | | <huGIPR> 21-143_4B1 | AKTKPCEEQYGSTYRCVSVLTVLHQDWLNGKEYKCKVSNKAL | |
| | | VK1 (1-236) | PAPIEKTISKAKGQPREPQVYTLPPSREEMTKNQVSLTCLVKGF | |
| | | VL]:: huKLC-CL | YPSDIAVEWESNGQPENNYKTTPPVLDSDGSFFLYSKLTVDKSR | |
| | | (Pepti-HC) | WQQGNVFSCSVMHEALHNHYTQKSLSLSPGK (SEQ ID NO: | |
| | | | 3530) | |
| PL- | iPS: | huGLP-1(A2G, E3D, | HGDGTFTSDVSSYLEEQAAKEFIEWLKNGGGGAPAPAPAPAPA | DIQMTQSPSSLSASIGDRVTITCRASQDIR |
| 47425 | 428065 | G16E, A24E, V27K, | PAPAPAPAPGQVQLVESGGGVVQPGRSLRLSCAASGFTFSYFG | DYLGWYQQKPGKAPKRLIYGASSLQSG |
| | | K28N, R30G):: | MHWVRQAPGKGLEWVAVIWYDGSNKYYADSVKGRFTISRDN | VPSRFSGSGSGTEFTLTISSLQPEDFATYY |
| | | G:: (AP)10:: G:: | SKNTLYLQMNSLRAEDTAVYYCARDGTIFGVLLGDYWGQGTL | CLQHNNYPFTFGPGTKVDIKRTVAAPSV |
| | | [hu anti-<huGIPR> | VTVSSASTKGPSVFPLAPSSKSTSGGTAALGCLVKDYFPEPVTV | FIFPPSDEQLKSGTASVVCLLNNFYPREA |
| | | 21-143_6H1 VH3 | SWNSGALTSGVHTFPAVLQSSGLYSLSSVVTVPSSSLGTQTYIC | KVQWKVDNALQSGNSQESVTEQDSKDS |
| | | VH]:huIgG1zSEFL2-2 | NVNHKPSNTKVDKKVEPKSCDKTHTCPPCPAPELLGGPSVFLFP | TYSLSSTLTLSKADYEKHKVYACEVTHQ |
| | | + [Unknown anti- | PKPKDTLMISRTPEVTCVVVDVSHEDPEVKFNWYVDGVEVHN | GLSSPVTKSFNRGEC (SEQ ID NO: 3822) |
| | | <huGIPR> 21-143_4B1 | AKTKPCEEQYGSTYRCVSVLTVLHQDWLNGKEYKCKVSNKAL | |
| | | VK1 (1-236) | PAPIEKTISKAKGQPREPQVYTLPPSREEMTKNQVSLTCLVKGF | |
| | | VL]:: huKLC-CL | YPSDIAVEWESNGQPENNYKTTPPVLDSDGSFFLYSKLTVDKSR | |
| | | (Pepti-HC) | WQQGNVFSCSVMHEALHNHYTQKSLSLSPGK (SEQ ID NO: | |
| | | | 3531) | |
| PL- | iPS: | huGLP-1(A2S, E3D, | HSDGTFTSDVSSYLEEQAAKEFIEWLKNGGGGAPAPAPAPAPA | DIQMTQSPSSLSASIGDRVTITCRASQDIR |
| 47426 | 428066 | G16E, A24E, V27K, | PAPAPAPAPGQVQLVESGGGVVQPGRSLRLSCAASGFTFSYFG | DYLGWYQQKPGKAPKRLIYGASSLQSG |
| | | K28N, R30G):: | MHWVRQAPGKGLEWVAVIWYDGSNKYYADSVKGRFTISRDN | VPSRFSGSGSGTEFTLTISSLQPEDFATYY |
| | | G:: (AP)10:: G:: | SKNTLYLQMNSLRAEDTAVYYCARDGTIFGVLLGDYWGQGTL | CLQHNNYPFTFGPGTKVDIKRTVAAPSV |
| | | [hu anti-<huGIPR> | VTVSSASTKGPSVFPLAPSSKSTSGGTAALGCLVKDYFPEPVTV | FIFPPSDEQLKSGTASVVCLLNNFYPREA |
| | | 21-143_6H1 VH3 | SWNSGALTSGVHTFPAVLQSSGLYSLSSVVTVPSSSLGTQTYIC | KVQWKVDNALQSGNSQESVTEQDSKDS |
| | | VH]:huIgG1zSEFL2-2 | NVNHKPSNTKVDKKVEPKSCDKTHTCPPCPAPELLGGPSVFLFP | TYSLSSTLTLSKADYEKHKVYACEVTHQ |
| | | + [Unknown anti- | PKPKDTLMISRTPEVTCVVVDVSHEDPEVKFNWYVDGVEVHN | GLSSPVTKSFNRGEC (SEQ ID NO: 3823) |
| | | <huGIPR> 21-143_4B1 | AKTKPCEEQYGSTYRCVSVLTVLHQDWLNGKEYKCKVSNKAL | |
| | | VK1 (1-236) | PAPIEKTISKAKGQPREPQVYTLPPSREEMTKNQVSLTCLVKGF | |
| | | VL]:: huKLC-CL | YPSDIAVEWESNGQPENNYKTTPPVLDSDGSFFLYSKLTVDKSR | |
| | | (Pepti-HC) | WQQGNVFSCSVMHEALHNHYTQKSLSLSPGK (SEQ ID NO: | |
| | | | 3532) | |
| PL | iPS: | huGLP1(Ana):: | HGEGTFTSDVSSYLEEQAAKEFIEWLKNGGGGSGSATGGSGSV | EIVMTQSPATLSVSPGERATLSCRASQSV |
| 50123 | 472652 | 1KmodT482V, M493L):: | ASSGSGSATHLQVQLVESGGGVVQPGRSLRLSCAASGFTFSNY | SSNLAWYQQKPGQAPRLLIYGAATRATG |
| PL- | | [hu anti-<huGIPR> | GMHWVRQAPGEGLEWVAAIWFDASDKYYADAVKGRFTISRD | IPARVSGSGSGTEFTLTISSLQSEDFAVYY |
| 50581 | | 21-143_2G10_LC1.003 | NSKNTLYLQMNSLRAEDTAVYYCARDQAIFGVVPDYWGQGTL | CQQYNNWPLTFGGGTKVEIKRTVAAPSV |
| PL- | | VH3 (1-472) | VTVSSASTKGPSVFPLAPSSKSTSGGTAALGCLVKDYFPEPVTV | FIFPPSDEQLKSGTASVVCLLNNFYPREA |
| 51747 | | (S73(85)A, G65(77) | SWNSGALTSGVHTFPAVLQSSGLYSLSSVVTVPSSSLGTQTYIC | KVQWKVDNALQSGNSQESVTEQDSKDS |
| PL- | | A) | NVNHKPSNTKVDKKVEPKSCDKTHTCPPCPAPELLGGPSVFLFP | TYSLSSTLTLSKADYEKHKVYACEVTHQ |
| 51763 | | VH]:: huIgG1zSEFL2-2 | PKPKDTLMISRTPEVTCVVVDVSHEDPEVKFNWYVDGVEVHN | GLSSPVTKSFNRGEC (SEQ ID NO: 3824) |
| | | + [hu anti-<huGIPR> | AKTKPCEEQYGSTYRCVSVLTVLHQDWLNGKEYKCKVSNKAL | |
| | | 21-143_2G10 LC1 VK3 | PAPIEKTISKAKGQPREPQVYTLPPSREEMTKNQVSLTCLVKGF | |
| | | (1-236) VL]:: huKLC- | YPSDIAVEWESNGQPENNYKTTPPVLDSDGSFFLYSKLTVDKSR | |
| | | CL (mAb-fusion) | WQQGNVFSCSVMHEALHNHYTQKSLSLSPGK (SEQ ID NO: | |
| | | | 3533) | |
| PL- | iPS: | huGLP1(Ana):: | HGEGTFTSDVSSYLEEQAAKEFIEWLKNGGGGAPAPAPAPAPA | EIVMTQSPATLSVSPGERATLSCRASQSV |
| 50155 | 472653 | (AP)10:: [hu anti- | PAPAPAPAPGQVQLVESGGGVVQPGRSLRLSCAASGFTFSNYG | SSNLAWYQQKPGQAPRLLIYGAATRATG |
| | | <huGIPR> 21- | MHWVRQAPGEGLEWVAAIWFDASDKYYADAVKGRFTISRDN | IPARVSGSGSGTEFTLTISSLQSEDFAVYY |
| | | 143_2G10_LC1.003 | SKNTLYLQMNSLRAEDTAVYYCARDQAIFGVVPDYWGQGTLV | CQQYNNWPLTFGGGTKVEIKRTVAAPSV |
| | | VH3 (1-472) | TVSSASTKGPSVFPLAPSSKSTSGGTAALGCLVKDYFPEPVTVS | FIFPPSDEQLKSGTASVVCLLNNFYPREA |
| | | (S73(85)A, G65(77) | WNSGALTSGVHTFPAVLQSSGLYSLSSVVTVPSSSLGTQTYICN | KVQWKVDNALQSGNSQESVTEQDSKDS |
| | | A) | VNHKPSNTKVDKKVEPKSCDKTHTCPPCPAPELLGGPSVFLFPP | TYSLSSTLTLSKADYEKHKVYACEVTHQ |
| | | VH]:: huIgG1zSEFL2-2 | KPKDTLMISRTPEVTCVVVDVSHEDPEVKFNWYVDGVEVHNA | GLSSPVTKSFNRGEC (SEQ ID NO: 3825) |
| | | + [hu anti-<huGIPR> | KTKPCEEQYGSTYRCVSVLTVLHQDWLNGKEYKCKVSNKALP | |
| | | 21-143_2G10 LC1 VK3 | APIEKTISKAKGQPREPQVYTLPPSREEMTKNQVSLTCLVKGFY | |
| | | (1-236) VL]:: huKLC- | PSDIAVEWESNGQPENNYKTTPPVLDSDGSFFLYSKLTVDKSR | |
| | | CL (mAb-fusion) | WQQGNVFSCSVMHEALHNHYTQKSLSLSPGK (SEQ ID NO: | |
| | | | 3534) | |
| PL- | iPS: | huGLP1(Ana):: | HGEGTFTSDVSSYLEEQAAKEFIEWLKNGGGGGGGAGGGGAG | EIVMTQSPATLSVSPGERATLSCRASQSV |
| 50124 | 472654 | (G4A)3:: [hu anti- | GGGAGGGGQVQLVESGGGVVQPGRSLRLSCAASGFTFSNYGM | SSNLAWYQQKPGQAPRLLIYGAATRATG |
| PL- | | <huGIPR> 21-143_2G10 | HWVRQAPGEGLEWVAAIWFDASDKYYADAVKGRFTISRDNSK | IPARVSGSGSGTEFTLTISSLQSEDFAVYY |
| 50582 | | LC1.003 VH3 (1- | NTLYLQMNSLRAEDTAVYYCARDQAIFGVVPDYWGQGTLVT | CQQYNNWPLTFGGGTKVEIKRTVAAPSV |
| PL- | | 472)(S73(85)A, | VSSASTKGPSVFPLAPSSKSTSGGTAALGCLVKDYFPEPVTVSW | FIFPPSDEQLKSGTASVVCLLNNFYPREA |
| 51748 | | G65(77) VH]:: | NSGALTSGVHTFPAVLQSSGLYSLSSVVTVPSSSLGTQTYICNV | KVQWKVDNALQSGNSQESVTEQDSKDS |
| PL- | | huIgG1zSEFL2-2 + | NHKPSNTKVDKKVEPKSCDKTHTCPPCPAPELLGGPSVFLFPPK | TYSLSSTLTLSKADYEKHKVYACEVTHQ |
| 51764 | | [hu anti-<huGIPR> | PKDTLMISRTPEVTCVVVDVSHEDPEVKFNWYVDGVEVHNAK | GLSSPVTKSFNRGEC (SEQ ID NO: 3826) |
| | | 21-143_2G10 LC1 VK3 | TKPCEEQYGSTYRCVSVLTVLHQDWLNGKEYKCKVSNKALPA | |
| | | (1-236) VL]:: huKLC- | PIEKTISKAKGQPREPQVYTLPPSREEMTKNQVSLTCLVKGFYP | |
| | | CL (mAb-fusion) | SDIAVEWESNGQPENNYKTTPPVLDSDGSFFLYSKLTVDKSRW | |
| | | | QQGNVFSCSVMHEALHNHYTQKSLSLSPGK (SEQ ID NO: 3535) | |
| PL- | iPS: | huGLP1(Hyb):: | HGEGTFTSDVSSYLEGEAVRLFIEWLKNGGPSSGAPPPSGSGSA | EIVMTQSPATLSVSPGERATLSCRASQSV |
| 50156 | 472655 | 1KmodT482V,M493L):: | TGGSGSVASSGSGSATHLQVQLVESGGGVVQPGRSLRLSCAAS | SSNLAWYQQKPGQAPRLLIYGAATRATG |
| | | [hu anti-<huGIPR> | GFTFSNYGMHWVRQAPGEGLEWVAAIWFDASDKYYADAVKG | IPARVSGSGSGTEFTLTISSLQSEDFAVYY |
| | | 21-143_2G10_LC1.003 | RFTISRDNSKNTLYLQMNSLRAEDTAVYYCARDQAIFGVVPDY | CQQYNNWPLTFGGGTKVEIKRTVAAPSV |
| | | VH3 (1-472) | WGQGTLVTVSSASTKGPSVFPLAPSSKSTSGGTAALGCLVKDY | FIFPPSDEQLKSGTASVVCLLNNFYPREA |
| | | (S73(85)A, G65(77) | FPEPVTVSWNSGALTSGVHTFPAVLQSSGLYSLSSVVTVPSSSL | KVQWKVDNALQSGNSQESVTEQDSKDS |
| | | A) | GTQTYICNVNHKPSNTKVDKKVEPKSCDKTHTCPPCPAPELLG | TYSLSSTLTLSKADYEKHKVYACEVTHQ |
| | | VH]:: huIgG1zSEFL2-2 | GPSVFLFPPKPKDTLMISRTPEVTCVVVDVSHEDPEVKFNWYV | GLSSPVTKSFNRGEC (SEQ ID NO: 3827) |
| | | + [hu anti-<huGIPR> | DGVEVHNAKTKPCEEQYGSTYRCVSVLTVLHQDWLNGKEYK | |
| | | 21-143 2G10 LC1 VK3 | CKVSNKALPAPIEKTISKAKGQPREPQVYTLPPSREEMTKNQVS | |
| | | (1-236) VL]:: huKLC- | LTCLVKGFYPSDIAVEWESNGQPENNYKTTPPVLDSDGSFFLYS | |
| | | CL (mAb-fusion) | KLTVDKSRWQQGNVFSCSVMHEALHNHYTQKSLSLSPGK | |
| | | | (SEQ ID NO: 3536) | |
| PL- | iPS: | huGLP1(Hyb):: | HGEGTFTSDVSSYLEGEAVRLFIEWLKNGGPSSGAPPPSGAPAP | |
| 50157 | 472656 | (AP)10:: [hu anti- | APAPAPAPAPAPAPAPGQVQLVESGGGVVQPGRSLRLSCAASG | SSNLAWYQQKPGQAPRLLIYGAATRATG |
| | | <huGIPR> 21-143_ | FTFSNYGMHWVRQAPGEGLEWVAAIWFDASDKYYADAVKGR | IPARVSGSGSGTEFTLTISSLQSEDFAVYY |
| | | 2G10_LC1.003VH3 | FTISRDNSKNTLYLQMNSLRAEDTAVYYCARDQAIFGVVPDY | CQQYNNWPLTFGGGTKVEIKRTVAAPSV |
| | | (1-472)(S73(85)A, | WGQGTLVTVSSASTKGPSVFPLAPSSKSTSGGTAALGCLVKDY | FIFPPSDEQLKSGTASVVCLLNNFYPREA |
| | | G65(77)A) | FPEPVTVSWNSGALTSGVHTFPAVLQSSGLYSLSSVVTVPSSSL | KVQWKVDNALQSGNSQESVTEQDSKDS |
| | | VH]:: huIgG1zSEFL2-2 | GTQTYICNVNHKPSNTKVDKKVEPKSCDKTHTCPPCPAPELLG | TYSLSSTLTLSKADYEKHKVYACEVTHQ |
| | | + [hu anti-<huGIPR> | GPSVFLFPPKPKDTLMISRTPEVTCVVVDVSHEDPEVKFNWYV | GLSSPVTKSFNRGEC (SEQ ID NO: 3828) |
| | | 21-143_2G10 LC1 VK3 | DGVEVHNAKTKPCEEQYGSTYRCVSVLTVLHQDWLNGKEYK | |
| | | (1-236) VL]:: huKLC- | CKVSNKALPAPIEKTISKAKGQPREPQVYTLPPSREEMTKNQVS | |
| | | CL (mAb-fusion) | LTCLVKGFYPSDIAVEWESNGQPENNYKTTPPVLDSDGSFFLYS | |
| | | | KLTVDKSRWQQGNVFSCSVMHEALHNHYTQKSLSLSPGK | |
| | | | (SEQ ID NO: 3537) | |
| PL- | iPS: | huGLP1(Hyb):: | HGEGTFTSDVSSYLEGEAVRLFIEWLKNGGPSSGAPPPSGGGGA | EIVMTQSPATLSVSPGERATLSCRASQSV |
| 50159 | 472657 | (G4A)3:: [hu anti | GGGGAGGGGAGGGGQVQLVESGGGVVQPGRSLRLSCAASGFT | SSNLAWYQQKPGQAPRLLIYGAATRATG |
| | | <huGIPR> 21-143 | FSNYGMHWVRQAPGEGLEWVAAIWFDASDKYYADAVKGRFT | IPARVSGSGSGTEFTLTISSLQSEDFAVYY |
| | | 2G10_LC1.003 VH3 (1- | ISRDNSKNTLYLQMNSLRAEDTAVYYCARDQAIFGVVPDYWG | CQQYNNWPLTFGGGTKVEIKRTVAAPSV |
| | | 472)(S73(85)A, | QGTLVTVSSASTKGPSVFPLAPSSKSTSGGTAALGCLVKDYFPE | FIFPPSDEQLKSGTASVVCLLNNFYPREA |
| | | G65(77)A) | PVTVSWNSGALTSGVHTFPAVLQSSGLYSLSSVVTVPSSSLGTQ | KVQWKVDNALQSGNSQESVTEQDSKDS |
| | | VH]:: huIgG1zSEFL2-2 | TYICNVNHKPSNTKVDKKVEPKSCDKTHTCPPCPAPELLGGPSV | TYSLSSTLTLSKADYEKHKVYACEVTHQ |
| | | + [hu anti-<huGIPR> | FLFPPKPKDTLMISRTPEVTCVVVDVSHEDPEVKFNWYVDGVE | GLSSPVTKSFNRGEC (SEQ ID NO: 3829) |
| | | 21-143_2G10_LC1 VK3 | VHNAKTKPCEEQYGSTYRCVSVLTVLHQDWLNGKEYKCKVS | |
| | | (1-236) VL]:: huKLC- | NKALPAPIEKTISKAKGQPREPQVYTLPPSREEMTKNQVSLTCL | |
| | | CL (mAb-fusion) | VKGFYPSDIAVEWESNGQPENNYKTTPPVLDSDGSFFLYSKLTV | |
| | | | DKSRWQQGNVFSCSVMHEALHNHYTQKSLSLSPGK (SEQ ID | |
| | | | NO: 3538) | |
| PL- | iPS: | huGLP1(Ana):: | HGEGTFTSDVSSYLEEQAAKEFIEWLKN | QVQLVESGGGVVQPGRSLRLSCAASGFTFSNYGMHWVRQAPG |
| 50125 | 472658 | 1Klinkermod:: [hu | GGGGSGSATGGSGSVASSGSGSATHLEI | EGLEWVAAIWFDASDKYYADAVKGRFTISRDNSKNTLYLQMN |
| PL- | | anti-<huGIPR> 21- | VMTQSPATLSVSPGERATLSCRASQSVSS | SLRAEDTAVYYCARDQAIFGVVPDYWGQGTLVTVSSASTKGPS |
| 50583 | | 143_2G10 LC1 VK3 | NLAWYQQKPGQAPRLLIYGAATRATGIP | VFPLAPSSKSTSGGTAALGCLVKDYFPEPVTVSWNSGALTSGV |
| PL- | | (1-236) VL]:: huKLC- | ARVSGSGSGTEFTLTISSLQSEDFAVYYC | HTFPAVLQSSGLYSLSSVVTVPSSSLGTQTYICNVNHKPSNTKV |
| 51749 | | CL + [hu anti- | QQYNNWPLTFGGGTKVEIKRTVAAPSVF | DKKVEPKSCDKTHTCPPCPAPELLGGPSVFLFPPKPKDTLMISRT |
| PL- | | <huGIPR> 21-143_ | IFPPSDEQLKSGTASVVCLLNNFYPREAK | PEVTCVVVDVSHEDPEVKFNWYVDGVEVHNAKTKPCEEQYGS |
| 51765 | | 2G10_LC1.003 VH3 | VQWKVDNALQSGNSQESVTEQDSKDST | TYRCVSVLTVLHQDWLNGKEYKCKVSNKALPAPIEKTISKAKG |
| | | (1-472)(S73(85)A, | YSLSSTLTLSKADYEKHKVYACEVTHQG | QPREPQVYTLPPSREEMTKNQVSLTCLVKGFYPSDIAVEWESNG |
| | | G65(77)A) | LSSPVTKSFNRGEC (SEQ ID NO: 3539) | QPENNYKTTPPVLDSDGSFFLYSKLTVDKSRWQQGNVFSCSVM |
| | | VH]:: huIgG1zSEFL2-2 | | HEALHNHYTQKSLSLSPGK (SEQ ID NO: 3830) |
| | | (mAb-fusion) | | |
| PL- | iPS: | huGLP1(Ana):: | HGEGTFTSDVSSYLEEQAAKEFIEWLKN | QVQLVESGGGVVQPGRSLRLSCAASGFTFSNYGMHWVRQAPG |
| 50160 | 472659 | (AP)10:: [hu anti- | GGGGAPAPAPAPAPAPAPAPAPAPGEIV | EGLEWVAAIWFDASDKYYADAVKGRFTISRDNSKNTLYLQMN |
| | | <huGIPR> 21-143_ | MTQSPATLSVSPGERATLSCRASQSVSSN | SLRAEDTAVYYCARDQAIFGVVPDYWGQGTLVTVSSASTKGPS |
| | | 2G10_LC1 VK3 | LAWYQQKPGQAPRLLIYGAATRATGIPA | VFPLAPSSKSTSGGTAALGCLVKDYFPEPVTVSWNSGALTSGV |
| | | (1-236) VL]:: huKLC- | RVSGSGSGTEFTLTISSLQSEDFAVYYCQ | HTFPAVLQSSGLYSLSSVVTVPSSSLGTQTYICNVNHKPSNTKV |
| | | CL + [hu anti- | QYNNWPLTFGGGTKVEIKRTVAAPSVFI | DKKVEPKSCDKTHTCPPCPAPELLGGPSVFLFPPKPKDTLMISRT |
| | | <huGIPR> 21-143_ | FPPSDEQLKSGTASVVCLLNNFYPREAK | PEVTCVVVDVSHEDPEVKFNWYVDGVEVHNAKTKPCEEQYGS |
| | | 2G10_LC1.003 VH3 (1- | VQWKVDNALQSGNSQESVTEQDSKDST | TYRCVSVLTVLHQDWLNGKEYKCKVSNKALPAPIEKTISKAKG |
| | | 472)(S73(85)A, | YSLSSTLTLSKADYEKHKVYACEVTHQG | QPREPQVYTLPPSREEMTKNQVSLTCLVKGFYPSDIAVEWESNG |
| | | G65(77)A) | LSSPVTKSFNRGEC (SEQ ID NO: 3540) | QPENNYKTTPPVLDSDGSFFLYSKLTVDKSRWQQGNVFSCSVM |
| | | VH]:: huIgG1zSEFL2-2 | | HEALHNHYTQKSLSLSPGK (SEQ ID NO: 3831) |
| | | (mAb-fusion) | | |
| PL- | iPS: | huGLP1(Ana):: (G4A)2: | HGEGTFTSDVSSYLEEQAAKEFIEWLKN | QVQLVESGGGVVQPGRSLRLSCAASGFTFSNYGMHWVRQAPG |
| 50126 | 472660 | G4:: [hu anti- | GGGGGGGAGGGGAGGGGAGGGGEIVM | EGLEWVAAIWFDASDKYYADAVKGRFTISRDNSKNTLYLQMN |
| PL- | | <huGIPR> 21-143_ | TQSPATLSVSPGERATLSCRASQSVSSNL | SLRAEDTAVYYCARDQAIFGVVPDYWGQGTLVTVSSASTKGPS |
| 50584 | | 2G10_LC1 VK3 (1-236) | AWYQQKPGQAPRLLIYGAATRATGIPAR | VFPLAPSSKSTSGGTAALGCLVKDYFPEPVTVSWNSGALTSGV |
| PL- | | VL]:: huKLC-CL | VSGSGSGTEFTLTISSLQSEDFAVYYCQQ | HTFPAVLQSSGLYSLSSVVTVPSSSLGTQTYICNVNHKPSNTKV |
| 51750 | | + [hu anti-<huGIPR> | YNNWPLTFGGGTKVEIKRTVAAPSVFIFP | DKKVEPKSCDKTHTCPPCPAPELLGGPSVFLFPPKPKDTLMISRT |
| PL- | | 21-143_2G10_LC1.003 | PSDEQLKSGTASVVCLLNNFYPREAKVQ | PEVTCVVVDVSHEDPEVKFNWYVDGVEVHNAKTKPCEEQYGS |
| 51766 | | VH3 (1- | WKVDNALQSGNSQESVTEQDSKDSTYS | TYRCVSVLTVLHQDWLNGKEYKCKVSNKALPAPIEKTISKAKG |
| PL- | | 472)(S73(85)A, | LSSTLTLSKADYEKHKVYACEVTHQGLS | QPREPQVYTLPPSREEMTKNQVSLTCLVKGFYPSDIAVEWESNG |
| 54099 | | G65(77)A) | SPVTKSFNRGEC (SEQ ID NO: 3541) | QPENNYKTTPPVLDSDGSFFLYSKLTVDKSRWQQGNVFSCSVM |
| | | VH]:: huIgG1zSEFL2-2 | | HEALHNHYTQKSLSLSPGK (SEQ ID NO: 3832) |
| | | (mAb-fusion) | | |
| PL- | iPS: | huGLP1(Hyb):: | HGEGTFTSDVSSYLEGEAVRLFIEWLKN | QVQLVESGGGVVQPGRSLRLSCAASGFTFSNYGMHWVRQAPG |
| 50161 | 472661 | m1Klinkerod:: [hu | GGPSSGAPPPSGSGSATGGSGSVASSGSG | EGLEWVAAIWFDASDKYYADAVKGRFTISRDNSKNTLYLQMN |
| | | <anti-huGIPR> 21- | SATHLEIVMTQSPATLSVSPGERATLSCR | SLRAEDTAVYYCARDQAIFGVVPDYWGQGTLVTVSSASTKGPS |
| | | 143_2G10_LC1 VK3 | ASQSVSSNLAWYQQKPGQAPRLLIYGAA | VFPLAPSSKSTSGGTAALGCLVKDYFPEPVTVSWNSGALTSGV |
| | | (1-236) VL]:: huKLC- | TRATGIPARVSGSGSGTEFTLTISSLQSED | HTFPAVLQSSGLYSLSSVVTVPSSSLGTQTYICNVNHKPSNTKV |
| | | CL + [hu anti- | FAVYYCQQYNNWPLTFGGGTKVEIKRT | DKKVEPKSCDKTHTCPPCPAPELLGGPSVFLFPPKPKDTLMISRT |
| | | <huGIPR> 21-143_ | VAAPSVFIFPPSDEQLKSGTASVVCLLNN | PEVTCVVVDVSHEDPEVKFNWYVDGVEVHNAKTKPCEEQYGS |
| | | 2G10_LC1.003 VH3 (1- | FYPREAKVQWKVDNALQSGNSQESVTE | TYRCVSVLTVLHQDWLNGKEYKCKVSNKALPAPIEKTISKAKG |
| | | 472)(S73(85)A, | QDSKDSTYSLSSTLTLSKADYEKHKVYA | QPREPQVYTLPPSREEMTKNQVSLTCLVKGFYPSDIAVEWESNG |
| | | G65(77)A) | CEVTHQGLSSPVTKSFNRGEC (SEQ ID | QPENNYKTTPPVLDSDGSFFLYSKLTVDKSRWQQGNVFSCSVM |
| | | VH]:: huIgG1zSEFL2-2 | NO: 3542) | HEALHNHYTQKSLSLSPGK (SEQ ID NO: 3833) |
| | | (mAb-fusion) | | |
| PL- | iPS: | huGLP1(Hyb):: | HGEGTFTSDVSSYLEGEAVRLFIEWLKN | QVQLVESGGGVVQPGRSLRLSCAASGFTFSNYGMHWVRQAPG |
| 50163 | 472662 | (AP)10:: [hu anti- | GGPSSGAPPPSGAPAPAPAPAPAPAPAPA | EGLEWVAAIWFDASDKYYADAVKGRFTISRDNSKNTLYLQMN |
| | | <huGIPR> 21- | PAPGEIVMTQSPATLSVSPGERATLSCRA | SLRAEDTAVYYCARDQAIFGVVPDYWGQGTLVTVSSASTKGPS |
| | | 143_2G10_LC1 VK3 | SQSVSSNLAWYQQKPGQAPRLLIYGAAT | VFPLAPSSKSTSGGTAALGCLVKDYFPEPVTVSWNSGALTSGV |
| | | (1-236) VL]:: huKLC- | RATGIPARVSGSGSGTEFTLTISSLQSEDF | HTFPAVLQSSGLYSLSSVVTVPSSSLGTQTYICNVNHKPSNTKV |
| | | CL + [hu anti- | AVYYCQQYNNWPLTFGGGTKVEIKRTV | DKKVEPKSCDKTHTCPPCPAPELLGGPSVFLFPPKPKDTLMISRT |
| | | <huGIPR> 21-143_2G10 | AAPSVFIFPPSDEQLKSGTASVVCLLNNF | PEVTCVVVDVSHEDPEVKFNWYVDGVEVHNAKTKPCEEQYGS |
| | | LC1.003 VH3 (1- | YPREAKVQWKVDNALQSGNSQESVTEQ | TYRCVSVLTVLHQDWLNGKEYKCKVSNKALPAPIEKTISKAKG |
| | | 472)(S73(85)A, | DSKDSTYSLSSTLTLSKADYEKHKVYAC | QPREPQVYTLPPSREEMTKNQVSLTCLVKGFYPSDIAVEWESNG |
| | | G65(77)A) | EVTHQGLSSPVTKSFNRGEC (SEQ ID NO: | QPENNYKTTPPVLDSDGSFFLYSKLTVDKSRWQQGNVFSCSVM |
| | | VH]:: huIgG1zSEFL2-2 | 3543) | HEALHNHYTQKSLSLSPGK (SEQ ID NO: 3834) |
| | | (mAb-fusion) | | |
| PL- | iPS: | huGLP1(Hyb):: (G4A)2: | HGEGTFTSDVSSYLEGEAVRLFIEWLKN | QVQLVESGGGVVQPGRSLRLSCAASGFTFSNYGMHWVRQAPGE |
| 50165 | 472663 | G4:: [hu anti- | GGPSSGAPPPSGGGGAGGGGAGGGGA | GLEWVAAIWFDASDKYYADAVKGRFTISRDNSKNTLYLQMNSL |
| | | <huGIPR> 21-143_2G10 | GGGGEIVMTQSPATLSVSPGERATLSCR | RAEDTAVYYCARDQAIFGVVPDYWGQGTLVTVSSASTKGPSVF |
| | | LC1 VK3 (1-236) VL]:: | ASQSVSSNLAWYQQKPGQAPRLLIYGA | PLAPSSKSTSGGTAALGCLVKDYFPEPVTVSWNSGALTSGVHTF |
| | | huKLC-CL + [hu anti- | ATRATGIPARVSGSGSGTEFTLTISSLQS | PAVLQSSGLYSLSSVVTVPSSSLGTQTYICNVNHKPSNTKVDKKV |
| | | <huGIPR> 21-143_ | EDFAVYYCQQYNNWPLTFGGGTKVEIK | EPKSCDKTHTCPPCPAPELLGGPSVFLFPPKPKDTLMISRTPEVTC |
| | | 2G10_LC1.003 VH3 (1- | RTVAAPSVFIFPPSDEQLKSGTASVVCLL | VVVDVSHEDPEVKFNWYVDGVEVHNAKTKPCEEQYGSTYRCV |
| | | 472)(S73(85)A, | NNFYPREAKVQWKVDNALQSGNSQES | SVLTVLHQDWLNGKEYKCKVSNKALPAPIEKTISKAKGQPREPQ |
| | | G65(77)A | VTEQDSKDSTYSLSSTLTLSKADYEKHK | VYTLPPSREEMTKNQVSLTCLVKGFYPSDIAVEWESNGQPENNY |
| | | VH]:: huIgG1zSEFL2-2 | VYACEVTHQGLSSPVTKSFNRGEC (SEQK | TTPPVLDSDGSFFLYSKLTVDKSRWQQGNVFSCSVMHEALHN |
| | | (mAb-fusion) | IDNO:3544) | HYTQKSLSLSPGK (SEQ ID NO: 3835) |
| PL- | iPS: | huGLP1(Ana):: | HGEGTFTSDVSSYLEEQAAKEFIEWLKNGGGGSGSATGGSGSV | QSVLTQPPSASGTPGQRVTISCSGSSSNIG |
| 50511 | 476644 | 1KmodT482V, M493L):: | ASSGSGSATHLQMQVVQSGAEVKKPGASVKVSCKASGYTFTG | SNYVNWYQHLPGTAPKLLIYTNNQRPSG |
| | | [hu anti-<huGIPR> | YYMHWVRQAPGQGLEWMGWINPNSGGTNYAQKFQGRVTMT | VPDRFSGSKSGTSASLAISGLQSEDEADY |
| | | 21-143 2C2.005.013 | RDTSISTAYMELSSLRSDDTAVYYCARGGDYVFGTYRPHYYYG | FCATFDSSLNAPVFGGGTKLTVLGQPKA |
| | | VH1(1-480) | MDVWGQGTTVTVSSASTKGPSVFPLAPSSKSTSGGTAALGCLV | APSVTLFPPSSEELQANKATLVCLISDFYP |
| | | (R95(107)S, | KDYFPEPVTVSWNSGALTSGVHTFPAVLQSSGLYSLSSVVTVPS | GAVTVAWKADSSPVKAGVETTTPSKQS |
| | | W114(126)F) | SSLGTQTYICNVNHKPSNTKVDKKVEPKSCDKTHTCPPCPAPEL | NNKYAASSYLSLTPEQWKSHRSYSCQVT |
| | | VH]:: huIgG1zSEFL2-2 | LGGPSVFLFPPKPKDTLMISRTPEVTCVVVDVSHEDPEVKFNW | HEGSTVEKTVAPTECS (SEQ ID NO: 3836) |
| | | + [hu anti-<huGIPR> | YVDGVEVHNAKTKPCEEQYGSTYRCVSVLTVLHQDWLNGKE | |
| | | 21-143_2C2.005.012 | YKCKVSNKALPAPIEKTISKAKGQPREPQVYTLPPSREEMTKNQ | |
| | | VL1 (1-235) | VSLTCLVKGFYPSDIAVEWESNGQPENNYKTTPPVLDSDGSFFL | |
| | | (G136(117)A, D111 | YSKLTVDKSRWQQGNVFSCSVMHEALHNHYTQKSLSLSPGK | |
| | | (113)S, T40(52)Y) | (SEQ ID NO: 3545) | |
| | | VL]:: huLLC-C2 (mAb- | | |
| | | fusion) | | |
| PL- | iPS: | huGLP1(Ana):: | HGEGTFTSDVSSYLEEQAAKEFIEWLKN | QMQVVQSGAEVKKPGASVKVSCKASGYTFTGYYMHWVRQAP |
| 50512 | 476645 | 1KmodT482V, M493L):: | GGGGSGSATGGSGSVASSGSGSATHLQS | GQGLEWMGWINPNSGGTNYAQKFQGRVTMTRDTSISTAYMEL |
| | | [hu anti-<huGIPR> | VLTQPPSASGTPGQRVTISCSGSSSNIGSN | SSLRSDDTAVYYCARGGDYVFGTYRPHYYYGMDVWGQGTTV |
| | | 21-143_2C2.005.012 | YVNWYQHLPGTAPKLLIYTNNQRPSGVP | TVSSASTKGPSVFPLAPSSKSTSGGTAALGCLVKDYFPEPVTVS |
| | | VL1(1-235) | DRFSGSKSGTSASLAISGLQSEDEADYFC | WNSGALTSGVHTFPAVLQSSGLYSLSSVVTVPSSSLGTQTYICN |
| | | (G136(117)A, D111 | ATFDSSLNAPVFGGGTKLTVLGQPKAAP | VNHKPSNTKVDKKVEPKSCDKTHTCPPCPAPELLGGPSVFLFPP |
| | | (113)S, T40(52)Y) | SVTLFPPSSEELQANKATLVCLISDFYPG | KPKDTLMISRTPEVTCVVVDVSHEDPEVKFNWYVDGVEVHNA |
| | | VL]:: huLLC-C2 + [hu | AVTVAWKADSSPVKAGVETTTPSKQSN | KTKPCEEQYGSTYRCVSVLTVLHQDWLNGKEYKCKVSNKALP |
| | | anti-<huGIPR> 21- | NKYAASSYLSLTPEQWKSHRSYSCQVTH | APIEKTISKAKGQPREPQVYTLPPSREEMTKNQVSLTCLVKGFY |
| | | 143_2C2.005.013 VH1 | EGSTVEKTVAPTECS (SEQ ID NO: 3546) | PSDIAVEWESNGQPENNYKTTPPVLDSDGSFFLYSKLTVDKSR |
| | | (1-480) | | WQQGNVFSCSVMHEALHNHYTQKSLSLSPGK (SEQ ID NO: |
| | | (R95(107)S, | | 3837) |
| | | W114(126)F) | | |
| | | VH]:: huIgG1zSEFL2-2 | | |
| | | (mAb-fusion) | | |
| PL- | iPS: | huGLP1(Ana):: | HGEGTFTSDVSSYLEEQAAKEFIEWLKNGGGGAPAPAPAPAPA | QSVLTQPPSASGTPGQRVTISCSGSSSNIG |
| 50513 | 476646 | (AP)10::[hu anti- | PAPAPAPAPGQMQVVQSGAEVKKPGASVKVSCKASGYTFTGY | SNYVNWYQHLPGTAPKLLIYTNNQRPSG |
| | | <huGIPR> 21-143_ | YMHWVRQAPGQGLEWMGWINPNSGGTNYAQKFQGRVTMTR | VPDRFSGSKSGTSASLAISGLQSEDEADY |
| | | 2C2.005.013 VH1(1- | DTSISTAYMELSSLRSDDTAVYYCARGGDYVFGTYRPHYYYG | FCATFDSSLNAPVFGGGTKLTVLGQPKA |
| | | 480)(R95(107)S, | MDVWGQGTTVTVSSASTKGPSVFPLAPSSKSTSGGTAALGCLV | APSVTLFPPSSEELQANKATLVCLISDFYP |
| | | W114(126)F) | KDYFPEPVTVSWNSGALTSGVHTFPAVLQSSGLYSLSSVVTVPS | GAVTVAWKADSSPVKAGVETTTPSKQS |
| | | VH]:: huIgG1zSEFL2-2 | SSLGTQTYICNVNHKPSNTKVDKKVEPKSCDKTHTCPPCPAPEL | NNKYAASSYLSLTPEQWKSHRSYSCQVT |
| | | + [hu anti-<huGIPR> | LGGPSVFLFPPKPKDTLMISRTPEVTCVVVDVSHEDPEVKFNW | HEGSTVEKTVAPTECS (SEQ ID NO: 3838) |
| | | 21-143_2C2.005.012 | YVDGVEVHNAKTKPCEEQYGSTYRCVSVLTVLHQDWLNGKE | |
| | | VL1 (1-235) | YKCKVSNKALPAPIEKTISKAKGQPREPQVYTLPPSREEMTKNQ | |
| | | (G136(117)A, | VSLTCLVKGFYPSDIAVEWESNGQPENNYKTTPPVLDSDGSFFL | |
| | | D111(113)S, T40(52)Y) | YSKLTVDKSRWQQGNVFSCSVMHEALHNHYTQKSLSLSPGK | |
| | | VL]:: huLLC-C2 (mAb- | (SEQ ID NO: 3547) | |
| | | fusion) | | |
| PL- | iPS: | huGLP1(Ana):: | HGEGTFTSDVSSYLEEQAAKEFIEWLKNGGGG | QMQVVQSGAEVKKPGASVKVSCKASGYTFTGYYMHWV |
| 50514 | 476647 | (AP)10::[hu anti- | APAPAPAPAPAPAPAPAPAPGQSVLTQPPSASG | RQAPGQGLEWMGWINPNSGGTNYAQKFQGRVTMTRDT |
| | | <huGIPR> 21-143_ | TPGQRVTISCSGSSSNIGSNYVNWYQHLPGTAP | SISTAYMELSSLRSDDTAVYYCARGGDYVFGTYRPHYYY |
| | | 2C2.005.012 VL1(1- | KLLIYTNNQRPSGVPDRFSGSKSGTSASLAISGL | GMDVWGQGTTVTVSSASTKGPSVFPLAPSSKSTSGGTAA |
| | | 235)(G136(117)A, | QSEDEADYFCATFDSSLNAPVFGGGTKLTVLG | LGCLVKDYFPEPVTVSWNSGALTSGVHTFPAVLQSSGLY |
| | | D111(113)S, T40(52)Y) | QPKAAPSVTLFPPSSEELQANKATLVCLISDFYP | SLSSVVTVPSSSLGTQTYICNVNHKPSNTKVDKKVEPKSC |
| | | VL]:: huLLC-C2 + [hu | GAVTVAWKADSSPVKAGVETTTPSKQSNNKY | DKTHTCPPCPAPELLGGPSVFLFPPKPKDTLMISRTPEVTC |
| | | anti-<huGIPR> 21- | AASSYLSLTPEQWKSHRSYSCQVTHEGSTVEK | VVVDVSHEDPEVKFNWYVDGVEVHNAKTKPCEEQYGST |
| | | 143_2C2.005.013 VH1 | TVAPTECS (SEQ ID NO: 3548) | YRCVSVLTVLHQDWLNGKEYKCKVSNKALPAPIEKTISK |
| | | (1-480) | | AKGQPREPQVYTLPPSREEMTKNQVSLTCLVKGFYPSDIA |
| | | (R95(107)S, | | VEWESNGQPENNYKTTPPVLDSDGSFFLYSKLTVDKSRW |
| | | W114(126)F) | | QQGNVFSCSVMHEALHNHYTQKSLSLSPGK (SEQ ID NO: |
| | | VH]:huIgG1zSEFL2-2 | | 3839) |
| | | (mAb-fusion) | | |
| PL- | iPS: | huGLP1(Ana):: | HGEGTFTSDVSSYLEEQAAKEFIEWLKNGGGGGGGAGGGGAG | QSVLTQPPSASGTPGQRVTISCSGSSSNIG |
| 50515 | 476648 | (G4A)3::G4::[hu | GGGAGGGGQMQVVQSGAEVKKPGASVKVSCKASGYTFTGYY | SNYVNWYQHLPGTAPKLLIYTNNQRPSG |
| | | anti-<huGIPR> 21- | MHWVRQAPGQGLEWMGWINPNSGGTNYAQKFQGRVTMTRD | VPDRFSGSKSGTSASLAISGLQSEDEADY |
| | | 143_2C2.005.013 VH1 | TSISTAYMELSSLRSDDTAVYYCARGGDYVFGTYRPHYYYGM | FCATFDSSLNAPVFGGGTKLTVLGQPKA |
| | | (1-480)(R95(107)S, | DVWGQGTTVTVSSASTKGPSVFPLAPSSKSTSGGTAALGCLVK | APSVTLFPPSSEELQANKATLVCLISDFYP |
| | | W114(126)F) | DYFPEPVTVSWNSGALTSGVHTFPAVLQSSGLYSLSSVVTVPSS | GAVTVAWKADSSPVKAGVETTTPSKQS |
| | | VH]:: huIgG1zSEFL2-2 | SLGTQTYICNVNHKPSNTKVDKKVEPKSCDKTHTCPPCPAPELL | NNKYAASSYLSLTPEQWKSHRSYSCQVT |
| | | + [hu anti-<huGIPR> | GGPSVFLFPPKPKDTLMISRTPEVTCVVVDVSHEDPEVKFNWY | HEGSTVEKTVAPTECS (SEQ ID NO: 3840) |
| | | 21-143_2C2.005.012 | VDGVEVHNAKTKPCEEQYGSTYRCVSVLTVLHQDWLNGKEY | |
| | | VL1 (1-235) | KCKVSNKALPAPIEKTISKAKGQPREPQVYTLPPSREEMTKNQV | |
| | | (G136(117)A, | SLTCLVKGFYPSDIAVEWESNGQPENNYKTTPPVLDSDGSFFLY | |
| | | D111(113)S, T40(52)Y) | SKLTVDKSRWQQGNVFSCSVMHEALHNHYTQKSLSLSPGK | |
| | | VL]:: huLLC-C2 (mAb- | (SEQ ID NO: 3549) | |
| | | fusion) | | |
| PL- | iPS: | huGLP1(Ana):: | HGEGTFTSDVSSYLEEQAAKEFIEWL | QMQVVQSGAEVKKPGASVKVSCKASGYTFTGYYMHWVRQAPGQ |
| 50516 | 476649 | (G4A)3:: G4:: [hu | KNGGGGGGGAGGGGAGGGGAGGGG | GLEWMGWINPNSGGTNYAQKFQGRVTMTRDTSISTAYMELSSLRS |
| | | anti-<huGIPR> 21- | QSVLTQPPSASGTPGQRVTISCSGSSS | DDTAVYYCARGGDYVFGTYRPHYYYGMDVWGQGTTVTVSSAST |
| | | 143_2C2.005.012 VL1 | NIGSNYVNWYQHLPGTAPKLLIYTNN | KGPSVFPLAPSSKSTSGGTAALGCLVKDYFPEPVTVSWNSGALTSG |
| | | (1-235)(G136(117)A, | QRPSGVPDRFSGSKSGTSASLAISGLQ | VHTFPAVLQSSGLYSLSSVVTVPSSSLGTQTYICNVNHKPSNTKVD |
| | | D111(113)S, T40(52)Y) | SEDEADYFCATFDSSLNAPVFGGGTK | KKVEPKSCDKTHTCPPCPAPELLGGPSVFLFPPKPKDTLMISRTPEV |
| | | VL]:: huLLC-C2 + [hu | LTVLGQPKAAPSVTLFPPSSEELQANK | TCVVVDVSHEDPEVKFNWYVDGVEVHNAKTKPCEEQYGSTYRCV |
| | | anti-<huGIPR> 21- | ATLVCLISDFYPGAVTVAWKADSSPV | SVLTVLHQDWLNGKEYKCKVSNKALPAPIEKTISKAKGQPREPQV |
| | | 143_2C2.005.013 VH1 | KAGVETTTPSKQSNNKYAASSYLSLT | YTLPPSREEMTKNQVSLTCLVKGFYPSDIAVEWESNGQPENNYKT |
| | | (1-480) | PEQWKSHRSYSCQVTHEGSTVEKTVA | TPPVLDSDGSFFLYSKLTVDKSRWQQGNVFSCSVMHEALHNHYTQ |
| | | (R95(107)S, | PTECS (SEQ ID NO: 3550) | KSLSLSPGK (SEQ ID NO: 3841) |
| | | W114(126)F) | | |
| | | VH]:: huIgG1zSEFL2-2 | | |
| | | (mAb-fusion) | | |
| PL- | iPS: | huGLP1(Hyb):: | HGEGTFTSDVSSYLEGEAVRLFIEWLKNGGPSSGAPPPSGSGSA | QSVLTQPPSASGTPGQRVTISCSGSSSNIG |
| 50517 | 476650 | 1KmodT482V, M493L):: | TGGSGSVASSGSGSATHLQMQVVQSGAEVKKPGASVKVSCKA | SNYVNWYQHLPGTAPKLLIYTNNQRPSG |
| | | [hu anti-<huGIPR> | SGYTFTGYYMHWVRQAPGQGLEWMGWINPNSGGTNYAQKFQ | VPDRFSGSKSGTSASLAISGLQSEDEADY |
| | | 21-143_2C2.005.013 | GRVTMTRDTSISTAYMELSSLRSDDTAVYYCARGGDYVFGTY | FCATFDSSLNAPVFGGGTKLTVLGQPKA |
| | | VH1(1-480) | RPHYYYGMDVWGQGTTVTVSSASTKGPSVFPLAPSSKSTSGGT | APSVTLFPPSSEELQANKATLVCLISDFYP |
| | | (R95(107)S, | AALGCLVKDYFPEPVTVSWNSGALTSGVHTFPAVLQSSGLYSL | GAVTVAWKADSSPVKAGVETTTPSKQS |
| | | W114(126)F) | SSVVTVPSSSLGTQTYICNVNHKPSNTKVDKKVEPKSCDKTHT | NNKYAASSYLSLTPEQWKSHRSYSCQVT |
| | | VH]:: huIgG1zSEFL2-2 | CPPCPAPELLGGPSVFLFPPKPKDTLMISRTPEVTCVVVDVSHED | HEGSTVEKTVAPTECS (SEQ ID NO: 3842) |
| | | + [hu anti-<huGIPR> | PEVKFNWYVDGVEVHNAKTKPCEEQYGSTYRCVSVLTVLHQD | |
| | | 21-143_2C2.005.012 | WLNGKEYKCKVSNKALPAPIEKTISKAKGQPREPQVYTLPPSRE | |
| | | VL1 (1-235) | EMTKNQVSLTCLVKGFYPSDIAVEWESNGQPENNYKTTPPVLD | |
| | | (G136(117)A, | SDGSFFLYSKLTVDKSRWQQGNVFSCSVMHEALHNHYTQKSL | |
| | | D111(113)S, T40(52)Y) | SLSPGK (SEQ ID NO: 3551) | |
| | | VL]:: huLLC-C2 (mAb- | | |
| | | fusion) | | |
| PL- | iPS: | huGLP1(Hyb):: | HGEGTFTSDVSSYLEGEAVRLFIEWLKN | QMQVVQSGAEVKKPGASVKVSCKASGYTFTGYYMHWVRQAP |
| 50518 | 476651 | 1KmodT482V, M493L):: | GGPSSGAPPPSGSGSATGGSGSVASSGSGQ | GLEWMGWINPNSGGTNYAQKFQGRVTMTRDTSISTAYMELS |
| | | [hu anti-<huGIPR> | GSATHLQSVLTQPPSASGTPGQRVTISCS | SLRSDDTAVYYCARGGDYVFGTYRPHYYYGMDVWGQGTTVTV |
| | | 21-143_2C2.005.012 | GSSSNIGSNYVNWYQHLPGTAPKLLIYT | SSASTKGPSVFPLAPSSKSTSGGTAALGCLVKDYFPEPVTVSWNS |
| | | (VL11-235) | NNQRPSGVPDRFSGSKSGTSASLAISGL | GALTSGVHTFPAVLQSSGLYSLSSVVTVPSSSLGTQTYICNVNHK |
| | | (G136(117)A, | QSEDEADYFCATFDSSLNAPVFGGGTK | PSNTKVDKKVEPKSCDKTHTCPPCPAPELLGGPSVFLFPPKPKDT |
| | | D111(113)S, T40(52)Y) | LTVLGQPKAAPSVTLFPPSSEELQANKA | LMISRTPEVTCVVVDVSHEDPEVKFNWYVDGVEVHNAKTKPCE |
| | | VL]:: huLLC-C2 + [hu | TLVCLISDFYPGAVTVAWKADSSPVKA | EQYGSTYRCVSVLTVLHQDWLNGKEYKCKVSNKALPAPIEKTIS |
| | | anti-<huGIPR> 21- | GVETTTPSKQSNNKYAASSYLSLTPEQ | KAKGQPREPQVYTLPPSREEMTKNQVSLTCLVKGFYPSDIAVEW |
| | | 143_2C2.005.013 VH1 | WKSHRSYSCQVTHEGSTVEKTVAPTEC | ESNGQPENNYKTTPPVLDSDGSFFLYSKLTVDKSRWQQGNVFSC |
| | | (1-480) | S (SEQ ID NO: 3552) | SVMHEALHNHYTQKSLSLSPGK (SEQ ID NO: 3843) |
| | | (R95(107)S, | | |
| | | 2W114(16)F) | | |
| | | VH]:: huIgG1zSEFL2-2 | | |
| | | (mAb-fusion) | | |
| PL- | iPS: | huGLP1(Hyb):: | HGEGTFTSDVSSYLEGEAVRLFIEWLKNGGPSSGAPPPSGAPAP | QSVLTQPPSASGTPGQRVTISCSGSSSNIG |
| 50519 | 476652 | (AP)10::[hu anti- | APAPAPAPAPAPAPAPGQMQVVQSGAEVKKPGASVKVSCKAS | SNYVNWYQHLPGTAPKLLIYTNNQRPSG |
| | | <huGIPR> 21-143_ | GYTFTGYYMHWVRQAPGQGLEWMGWINPNSGGTNYAQKFQ | VPDRFSGSKSGTSASLAISGLQSEDEADY |
| | | 2C2.005.013 VH1(1- | GRVTMTRDTSISTAYMELSSLRSDDTAVYYCARGGDYVFGTY | FCATFDSSLNAPVFGGGTKLTVLGQPKA |
| | | 480)(R95(107)S, | RPHYYYGMDVWGQGTTVTVSSASTKGPSVFPLAPSSKSTSGGT | APSVTLFPPSSEELQANKATLVCLISDFYP |
| | | W114(126)F) | AALGCLVKDYFPEPVTVSWNSGALTSGVHTFPAVLQSSGLYSL | GAVTVAWKADSSPVKAGVETTTPSKQS |
| | | VH]:: huIgG1zSEFL2-2 | SSVVTVPSSSLGTQTYICNVNHKPSNTKVDKKVEPKSCDKTHT | NNKYAASSYLSLTPEQWKSHRSYSCQVT |
| | | + [hu anti-<huGIPR> | CPPCPAPELLGGPSVFLFPPKPKDTLMISRTPEVTCVVVDVSHED | HEGSTVEKTVAPTECS (SEQ ID NO: 3844) |
| | | 21-143_2C2.005.012 | PEVKFNWYVDGVEVHNAKTKPCEEQYGSTYRCVSVLTVLHQD | |
| | | VL1 (1-235) | WLNGKEYKCKVSNKALPAPIEKTISKAKGQPREPQVYTLPPSRE | |
| | | (G136(117)A, | EMTKNQVSLTCLVKGFYPSDIAVEWESNGQPENNYKTTPPVLD | |
| | | D111(113)S, T40(52)Y) | SDGSFFLYSKLTVDKSRWQQGNVFSCSVMHEALHNHYTQKSL | |
| | | VL]:: huLLC-C2 (mAb- | SLSPGK (SEQ ID NO: 3553) | |
| | | fusion) | | |
| PL- | iPS: | huGLP1(Hyb):: | HGEGTFTSDVSSYLEGEAVRLFIEWL | QMQVVQSGAEVKKPGASVKVSCKASGYTFTGYYMHWVRQAPGQ |
| 50520 | 476653 | (AP)10::[hu anti- | KNGGPSSGAPPPSGAPAPAPAPAPAPA | GLEWMGWINPNSGGTNYAQKFQGRVTMTRDTSISTAYMELSSLRS |
| | | <huGIPR> 21-143_ | PAPAPAPGQSVLTQPPSASGTPGQRVT | DDTAVYYCARGGDYVFGTYRPHYYYGMDVWGQGTTVTVSSAST |
| | | 2C2.005.012 VL1(1- | ISCSGSSSNIGSNYVNWYQHLPGTAPK | KGPSVFPLAPSSKSTSGGTAALGCLVKDYFPEPVTVSWNSGALTSG |
| | | 235)(G136(117)A, | LLIYTNNQRPSGVPDRFSGSKSGTSAS | VHTFPAVLQSSGLYSLSSVVTVPSSSLGTQTYICNVNHKPSNTKVD |
| | | D111(113)S, T40(52)Y) | LAISGLQSEDEADYFCATFDSSLNAPV | KKVEPKSCDKTHTCPPCPAPELLGGPSVFLFPPKPKDTLMISRTPEV |
| | | VL]:: huLLC-C2 + [hu | FGGGTKLTVLGQPKAAPSVTLFPPSSE | TCVVVDVSHEDPEVKFNWYVDGVEVHNAKTKPCEEQYGSTYRCV |
| | | anti-<huGIPR> 21- | ELQANKATLVCLISDFYPGAVTVAWK | SVLTVLHQDWLNGKEYKCKVSNKALPAPIEKTISKAKGQPREPQV |
| | | 143_2C2.005.013 VH1 | ADSSPVKAGVETTTPSKQSNNKYAAS | YTLPPSREEMTKNQVSLTCLVKGFYPSDIAVEWESNGQPENNYKT |
| | | (1-480) | SYLSLTPEQWKSHRSYSCQVTHEGS | TTPPVLDSDGSFFLYSKLTVDKSRWQQGNVFSCSVMHEALHNHYTQ |
| | | (R95(107)S, | VEKTVAPTECS (SEQ ID NO: 3554) | KSLSLSPGK (SEQ ID NO: 3845) |
| | | W114(126)F) | | |
| | | VH]:: huIgG1zSEFL2-2 | | |
| | | (mAb-fusion) | | |
| PL- | iPS: | huGLP1(Hyb):: | HGEGTFTSDVSSYLEGEAVRLFIEWLKNGGPSSGAPPPSGGGGA | QSVLTQPPSASGTPGQRVTISCSGSSSNIG |
| 50521 | 476654 | (G4A)3:: G4:: [hu | GGGGAGGGGAGGGGQMQVVQSGAEVKKPGASVKVSCKASG | SNYVNWYQHLPGTAPKLLIYTNNQRPSG |
| | | anti-<huGIPR> 21- | YTFTGYYMHWVRQAPGQGLEWMGWINPNSGGTNYAQKFQG | VPDRFSGSKSGTSASLAISGLQSEDEADY |
| | | 143_2C2.005.013 VH1 | RVTMTRDTSISTAYMELSSLRSDDTAVYYCARGGDYVFGTYRP | FCATFDSSLNAPVFGGGTKLTVLGQPKA |
| | | (1-480)(R95(107)S, | HYYYGMDVWGQGTTVTVSSASTKGPSVFPLAPSSKSTSGGTA | APSVTLFPPSSEELQANKATLVCLISDFYP |
| | | W114(126)F) | ALGCLVKDYFPEPVTVSWNSGALTSGVHTFPAVLQSSGLYSLS | GAVTVAWKADSSPVKAGVETTTPSKQS |
| | | VH]:: huIgG1zSEFL2-2 | SVVTVPSSSLGTQTYICNVNHKPSNTKVDKKVEPKSCDKTHTC | NNKYAASSYLSLTPEQWKSHRSYSCQVT |
| | | + [hu anti-<huGIPR> | PPCPAPELLGGPSVFLFPPKPKDTLMISRTPEVTCVVVDVSHEDP | HEGSTVEKTVAPTECS (SEQ ID NO: 3846) |
| | | 21-143_2C2.005.012 | EVKFNWYVDGVEVHNAKTKPCEEQYGSTYRCVSVLTVLHQD | |
| | | VL1(1-235) | WLNGKEYKCKVSNKALPAPIEKTISKAKGQPREPQVYTLPPSRE | |
| | | (G136(117)A, | EMTKNQVSLTCLVKGFYPSDIAVEWESNGQPENNYKTTPPVLD | |
| | | D111(113)S, T40(52)Y) | SDGSFFLYSKLTVDKSRWQQGNVFSCSVMHEALHNHYTQKSL | |
| | | VL]:: huLLC-C2 (mAb- | SLSPGK (SEQ ID NO: 3555) | |
| | | fusion) | | |
| PL- | iPS: | huGLP1(Hyb):: | HGEGTFTSDVSSYLEGEAVRLFIEWL | QMQVVQSGAEVKKPGASVKVSCKASGYTFTGYYMHWVRQAPGQ |
| 50522 | 476655 | (G4A)3::G4:: [hu | KNGGPSSGAPPPSGGGGAGGGGAGG | GLEWMGWINPNSGGTNYAQKFQGRVTMTRDTSISTAYMELSSLRS |
| | | anti-<huGIPR> 21- | GGAGGGGQSVLTQPPSASGTPGQRVT | DDTAVYYCARGGDYVFGTYRPHYYYGMDVWGQGTTVTVSSAST |
| | | 143_2C2.005.012 VL1 | ISCSGSSSNIGSNYVNWYQHLPGTAPK | KGPSVFPLAPSSKSTSGGTAALGCLVKDYFPEPVTVSWNSGALTSG |
| | | (1-235)(G136(117)A, | LLIYTNNQRPSGVPDRFSGSKSGTSAS | VHTFPAVLQSSGLYSLSSVVTVPSSSLGTQTYICNVNHKPSNTKVD |
| | | D111(113)S, T40(52)Y) | LAISGLQSEDEADYFCATFDSSLNAPV | KKVEPKSCDKTHTCPPCPAPELLGGPSVFLFPPKPKDTLMISRTPEV |
| | | VL]:: huLLC-C2 + [hu | FGGGTKLTVLGQPKAAPSVTLFPPSSE | TCVVVDVSHEDPEVKFNWYVDGVEVHNAKTKPCEEQYGSTYRCV |
| | | anti-<huGIPR> 21- | ELQANKATLVCLISDFYPGAVTVAWK | SVLTVLHQDWLNGKEYKCKVSNKALPAPIEKTISKAKGQPREPQV |
| | | 143_2C2.005.013 VH1 | ADSSPVKAGVETTTPSKQSNNKYAAS | YTLPPSREEMTKNQVSLTCLVKGFYPSDIAVEWESNGQPENNYKT |
| | | (1-480) | SYLSLTPEQWKSHRSYSCQVTHEGST | TPPVLDSDGSFFLYSKLTVDKSRWQQGNVFSCSVMHEALHNHYTQ |
| | | (R95(107)S, | VEKTVAPTECS (SEQ ID NO: 3556) | KSLSLSPGK (SEQ ID NO: 3847) |
| | | W114(126)F) | | |
| | | VH]:: huIgG1zSEFL2-2 | | |
| | | (mAb-fusion) | | |
| PL- | iPS: | huGLP1(Ana):: | HGEGTFTSDVSSYLEEQAAKEFIEWLKNGGGGSGSATGGSGSV | DIQLTQSPSSLSASVGDRVTITCRASQTIS |
| 50523 | 476656 | 1KmodT482V, M493L):: | ASSGSGSATHLQVQLVESGGGVVQPGRSLRLSCTASGFTFSSYG | RFLNWYQQKPGKAPELLIYVASSLQSGV |
| PL- | | [hu anti-<huGIPR> | IHWVRQAPGKGLEWVAVIWYDGSNKFHADSVKGRFTISRDNS | PSRFSGSGSGTDFTLTISSLQPEDFATYYC |
| 53170 | | 21-143_5G12.005 VH3 | KNTLYLQMNSLRAEDSAMYFCARGKVAGMPEAFEIWGQGTK | QQSYSTLISFGQGTKLEITRTVAAPSVFIF |
| | | (1-473)(141I, I58I) | VTVSSASTKGPSVFPLAPSSKSTSGGTAALGCLVKDYFPEPVTV | PPSDEQLKSGTASVVCLLNNFYPREAKV |
| | | VH]:: huIgG1zSEFL2-2 | SWNSGALTSGVHTFPAVLQSSGLYSLSSVVTVPSSSLGTQTYIC | QWKVDNALQSGNSQESVTEQDSKDSTY |
| | | + [hu anti-<huGIPR> | NVNHKPSNTKVDKKVEPKSCDKTHTCPPCPAPELLGGPSVFLFP | SLSSTLTLSKADYEKHKVYACEVTHQGL |
| | | 21-143_5G12.006 VK1 | PKPKDTLMISRTPEVTCVVVDVSHEDPEVKFNWYVDGVEVHN | SSPVTKSFNRGEC (SEQ ID NO: 3848) |
| | | (1-236)(C137(118)I) | AKTKPCEEQYGSTYRCVSVLTVLHQDWLNGKEYKCKVSNKAL | |
| | | VL]:: huKLC-CL (mAb- | PAPIEKTISKAKGQPREPQVYTLPPSREEMTKNQVSLTCLVKGF | |
| | | fusion) | YPSDIAVEWESNGQPENNYKTTPPVLDSDGSFFLYSKLTVDKSR | |
| | | | WQQGNVFSCSVMHEALHNHYTQKSLSLSPGK (SEQ ID NO: | |
| | | | 3557) | |
| PL- | iPS: | huGLP1(Ana):: | HGEGTFTSDVSSYLEEQAAKEFIEWLK | QVQLVESGGGVVQPGRSLRLSCTASGFTFSSYGIHWVRQAPGKG |
| 50524 | 476657 | 1KmodT482V, M493L):: | NGGGGSGSATGGSGSVASSGSGSATHL | LEWVAVIWYDGSNKFHADSVKGRFTISRDNSKNTLYLQMNSLRA |
| PL- | | [hu anti-<huGIPR> | DIQLTQSPSSLSASVGDRVTITCRASQTI | EDSAMYFCARGKVAGMPEAFEIWGQGTKVTVSSASTKGPSVFPL |
| 53167 | | 21-143_5G12.006 VK1 | SRFLNWYQQKPGKAPELLIYVASSLQS | APSSKSTSGGTAALGCLVKDYFPEPVTVSWNSGALTSGVHTFPAV |
| | | (1-236)(C137(118)I) | GVPSRFSGSGSGTDFTLTISSLQPEDFA | LQSSGLYSLSSVVTVPSSSLGTQTYICNVNHKPSNTKVDKKVEPKS |
| | | VL]:: huLLC-C2 + [hu | TYYCQQSYSTLISFGQGTKLEITRTVAA | CDKTHTCPPCPAPELLGGPSVFLFPPKPKDTLMISRTPEVTCVVVD |
| | | anti-<huGIPR> 21- | PSVFIFPPSDEQLKSGTASVVCLLNNFY | VSHEDPEVKFNWYVDGVEVHNAKTKPCEEQYGSTYRCVSVLTV |
| | | 143_5G12.005 VH3 (1- | PREAKVQWKVDNALQSGNSQESVTEQ | LHQDWLNGKEYKCKVSNKALPAPIEKTISKAKGQPREPQVYTLPP |
| | | 473)(1411, 158I) | DSKDSTYSLSSTLTLSKADYEKHKVYA | SREEMTKNQVSLTCLVKGFYPSDIAVEWESNGQPENNYKTTPPVL |
| | | VH]:: huIgG1zSEFL2-2 | CEVTHQGLSSPVTKSFNRGEC (SEQ ID | DSDGSFFLYSKLTVDKSRWQQGNVFSCSVMHEALHNHYTQKSLS |
| | | (mAb-fusion) | NO: 3558) | LSPGK (SEQ ID NO: 3849) |
| PL- | iPS: | huGLP1(Ana):: | HGEGTFTSDVSSYLEEQAAKEFIEWLKNGGGGAPAPAPAPAPA | DIQLTQSPSSLSASVGDRVTITCRASQTIS |
| 50525 | 476658 | (AP)10:: [hu anti- | PAPAPAPAPGQVQLVESGGGVVQPGRSLRLSCTASGFTFSSYGI | RFLNWYQQKPGKAPELLIYVASSLQSGV |
| | | <huGIPR> 21-143_ | HWVRQAPGKGLEWVAVIWYDGSNKFHADSVKGRFTISRDNSK | PSRFSGSGSGTDFTLTISSLQPEDFATYYC |
| | | 5G12.005 VH3 (1- | NTLYLQMNSLRAEDSAMYFCARGKVAGMPEAFEIWGQGTKV | QQSYSTLISFGQGTKLEITRTVAAPSVFIF |
| | | 473)(141I, I58I) | TVSSASTKGPSVFPLAPSSKSTSGGTAALGCLVKDYFPEPVTVS | PPSDEQLKSGTASVVCLLNNFYPREAKV |
| | | VH]:: huIgG1zSEFL2-2 | WNSGALTSGVHTFPAVLQSSGLYSLSSVVTVPSSSLGTQTYICN | QWKVDNALQSGNSQESVTEQDSKDSTY |
| | | + [hu anti-<huGIPR> | VNHKPSNTKVDKKVEPKSCDKTHTCPPCPAPELLGGPSVFLFPP | SLSSTLTLSKADYEKHKVYACEVTHQGL |
| | | 21-143_5G12.006 VK1 | KPKDTLMISRTPEVTCVVVDVSHEDPEVKFNWYVDGVEVHNA | SSPVTKSFNRGEC (SEQ ID NO: 3850) |
| | | (1-236)(C137(118)I) | KTKPCEEQYGSTYRCVSVLTVLHQDWLNGKEYKCKVSNKALP | |
| | | VL]:: huKLC-CL (mAb- | APIEKTISKAKGQPREPQVYTLPPSREEMTKNQVSLTCLVKGFY | |
| | | fusion) | PSDIAVEWESNGQPENNYKTTPPVLDSDGSFFLYSKLTVDKSR | |
| | | | WQQGNVFSCSVMHEALHNHYTQKSLSLSPGK (SEQ ID NO: | |
| | | | 3559) | |
| PL- | iPS: | huGLP1(Ana):: | HGEGTFTSDVSSYLEEQAAKEFIEWLKNGGGG | QVQLVESGGGVVQPGRSLRLSCTASGFTFSSYGIHWVRQ |
| 50526 | 476659 | (AP)10:: [hu anti- | APAPAPAPAPAPAPAPAPAPGDIQLTQSPSSLSA | APGKGLEWVAVIWYDGSNKFHADSVKGRFTISRDNSKN |
| | | <huGIPR> 21- | SVGDRVTITCRASQTISRFLNWYQQKPGKAPEL | TLYLQMNSLRAEDSAMYFCARGKVAGMPEAFEIWGQGT |
| | | 143_5G12.006 VK1 (1- | LIYVASSLQSGVPSRFSGSGSGTDFTLTISSLQPE | KVTVSSASTKGPSVFPLAPSSKSTSGGTAALGCLVKDYFP |
| | | 236)(C137(118)I) | DFATYYCQQSYSTLISFGQGTKLEITRTVAAPS | EPVTVSWNSGALTSGVHTFPAVLQSSGLYSLSSVVTVPSS |
| | | VL]:: huLLC-C2 + [hu | VFIFPPSDEQLKSGTASVVCLLNNFYPREAKVQ | SLGTQTYICNVNHKPSNTKVDKKVEPKSCDKTHTCPPCP |
| | | anti-<huGIPR> 21- | WKVDNALQSGNSQESVTEQDSKDSTYSLSSTL | APELLGGPSVFLFPPKPKDTLMISRTPEVTCVVVDVSHED |
| | | 143_5G12.005 VH3 (1- | TLSKADYEKHKVYACEVTHQGLSSPVTKSFNR | PEVKFNWYVDGVEVHNAKTKPCEEQYGSTYRCVSVLTV |
| | | 473)(I41I, I58I) | GEC (SEQ ID NO: 3560) | LHQDWLNGKEYKCKVSNKALPAPIEKTISKAKGQPREPQ |
| | | VH]:: huIgG1zSEFL2-2 | | VYTLPPSREEMTKNQVSLTCLVKGFYPSDIAVEWESNGQ |
| | | (mAb-fusion) | | PENNYKTTPPVLDSDGSFFLYSKLTVDKSRWQQGNVFSC |
| | | | | SVMHEALHNHYTQKSLSLSPGK (SEQ ID NO: 3851) |
| PL- | iPS: | huGLP1(Ana):: | HGEGTFTSDVSSYLEEQAAKEFIEWLKNGGGGGGGAGGGGAGGGGAGGG | DIQLTQSPSSLSASVGDRVTIT |
| 50527 | 476660 | (G4A)3:: G4:: [hu | GQVQLVESGGGVVQPGRSLRLSCTASGFTFSSYGIHWVRQAPGKGLEWVA | CRASQTISRFLNWYQQKPGK |
| PL- | | anti-<huGIPR> | VIWYDGSNKFHADSVKGRFTISRDNSKNTLYLQMNSLRAEDSAMYFCARG | APELLIYVASSLQSGVPSRFSG |
| 53168 | | 21-143_5G12.005 VH3 | KVAGMPEAFEIWGQGTKVTVSSASTKGPSVFPLAPSSKSTSGGTAALGCLV | SGSGTDFTLTISSLQPEDFATY |
| | | (1-473)(I41I, I58I) | KDYFPEPVTVSWNSGALTSGVHTFPAVLQSSGLYSLSSVVTVPSSSLGTQT | YCQQSYSTLISFGQGTKLEITR |
| | | VH]:: huIgG1zSEFL2-2 | YICNVNHKPSNTKVDKKVEPKSCDKTHTCPPCPAPELLGGPSVFLFPPKPKD | TVAAPSVFIFPPSDEQLKSGTA |
| | | + [hu anti-<huGIPR> | TLMISRTPEVTCVVVDVSHEDPEVKFNWYVDGVEVHNAKTKPCEEQYGST | SVVCLLNNFYPREAKVQWKV |
| | | 21-143_5G12.006 VK1 | YRCVSVLTVLHQDWLNGKEYKCKVSNKALPAPIEKTISKAKGQPREPQVY | DNALQSGNSQESVTEQDSKD |
| | | (1-236)(C137(118)I) | TLPPSREEMTKNQVSLTCLVKGFYPSDIAVEWESNGQPENNYKTTPPVLDS | STYSLSSTLTLSKADYEKHKV |
| | | VL]:: huKLC-CL (mAb- | DGSFFLYSKLTVDKSRWQQGNVFSCSVMHEALHNHYTQKSLSLSPGK | YACEVTHQGLSSPVTKSFNRG |
| | | fusion) | (SEQ ID NO: 3561) | EC (SEQ ID NO: 3852) |
| PL- | iPS: | huGLP1(Ana):: | HGEGTFTSDVSSYLEEQAAKEFIEWLKN | QVQLVESGGGVVQPGRSLRLSCTASGFTFSSYGIHWVRQAPGKG |
| 50528 | 476661 | (G4A)3:: G4:: [hu | GGGGGGGAGGGGAGGGGAGGGGDIQL | LEWVAVIWYDGSNKFHADSVKGRFTISRDNSKNTLYLQMNSLR |
| PL- | | anti-<huGIPR> | TQSPSSLSASVGDRVTITCRASQTISRFL | AEDSAMYFCARGKVAGMPEAFEIWGQGTKVTVSSASTKGPSVF |
| 53169 | | 21-143_5G12.006 VK1 | NWYQQKPGKAPELLIYVASSLQSGVPS | PLAPSSKSTSGGTAALGCLVKDYFPEPVTVSWNSGALTSGVHTF |
| | | (1-236)(C137(118)I) | RFSGSGSGTDFTLTISSLQPEDFATYYCQ | PAVLQSSGLYSLSSVVTVPSSSLGTQTYICNVNHKPSNTKVDKKV |
| | | VL]:: huLLC-C2 + [hu | QSYSTLISFGQGTKLEITRTVAAPSVFIFP | EPKSCDKTHTCPPCPAPELLGGPSVFLFPPKPKDTLMISRTPEVTC |
| | | anti-<huGIPR> 21- | PSDEQLKSGTASVVCLLNNFYPREAKV | VVVDVSHEDPEVKFNWYVDGVEVHNAKTKPCEEQYGSTYRCV |
| | | 143_5G12.005 VH3 (1- | QWKVDNALQSGNSQESVTEQDSKDST | SVLTVLHQDWLNGKEYKCKVSNKALPAPIEKTISKAKGQPREPQ |
| | | 473)(141I, I58I) | YSLSSTLTLSKADYEKHKVYACEVTHQ | VYTLPPSREEMTKNQVSLTCLVKGFYPSDIAVEWESNGQPENNY |
| | | VH]:: huIgG1zSEFL2-2 | GLSSPVTKSFNRGEC (SEQ ID NO: 3562) | KTTPPVLDSDGSFFLYSKLTVDKSRWQQGNVFSCSVMHEALHN |
| | | (mAb-fusion) | | HYTQKSLSLSPGK (SEQ ID NO: 3853) |
| PL- | iPS: | huGLP1(Hyb):: | HGEGTFTSDVSSYLEGEAVRLFIEWLKNGGPSSGAPPPSGSGSA | DIQLTQSPSSLSASVGDRVTITCRASQTIS |
| 50529 | 476662 | 1KmodT482V, M493L):: | TGGSGSVASSGSGSATHLQVQLVESGGGVVQPGRSLRLSCTAS | RFLNWYQQKPGKAPELLIYVASSLQSGV |
| | | [hu anti- | GFTFSSYGIHWVRQAPGKGLEWVAVIWYDGSNKFHADSVKGR | PSRFSGSGSGTDFTLTISSLQPEDFATYYC |
| | | <huGIPR> 21- | FTISRDNSKNTLYLQMNSLRAEDSAMYFCARGKVAGMPEAFEI | QQSYSTLISFGQGTKLEITRTVAAPSVFIF |
| | | 143_5G12.005 VH3 (1- | WGQGTKVTVSSASTKGPSVFPLAPSSKSTSGGTAALGCLVKDY | PPSDEQLKSGTASVVCLLNNFYPREAKV |
| | | 473)(141I, I58I) | FPEPVTVSWNSGALTSGVHTFPAVLQSSGLYSLSSVVTVPSSSL | QWKVDNALQSGNSQESVTEQDSKDSTY |
| | | VH]:: huIgG1zSEFL2-2 | GTQTYICNVNHKPSNTKVDKKVEPKSCDKTHTCPPCPAPELLG | SLSSTLTLSKADYEKHKVYACEVTHQGL |
| | | + [hu anti-<huGIPR> | GPSVFLFPPKPKDTLMISRTPEVTCVVVDVSHEDPEVKFNWYV | SSPVTKSFNRGEC (SEQ ID NO: 3854) |
| | | 21-143_5G12.006 VK1 | | DGVEVHNAKTKPCEEQYGSTYRCVSVLTVLHQDWLNGKEYK |
| | | (1-236)(C137(118)I) | | CKVSNKALPAPIEKTISKAKGQPREPQVYTLPPSREEMTKNQVS |
| | | VL]:: huKLC-CL (mAb- | | LTCLVKGFYPSDIAVEWESNGQPENNYKTTPPVLDSDGSFFLYS |
| | | fusion) | | KLTVDKSRWQQGNVFSCSVMHEALHNHYTQKSLSLSPGK |
| | | | | (SEQ ID NO: 3563) |
| PL- | iPS: | huGLP1(Hyb):: | HGEGTFTSDVSSYLEGEAVRLFIEWLKNG | QVQLVESGGGVVQPGRSLRLSCTASGFTFSSYGIHWVRQAPG |
| 50530 | 476663 | 1KmodT482V, M493L):: | GPSSGAPPPSGSGSATGGSGSVASSGSGSA | KGLEWVAVIWYDGSNKFHADSVKGRFTISRDNSKNTLYLQM |
| | | [hu anti-<huGIPR> | THLDIQLTQSPSSLSASVGDRVTITCRASQ | NSLRAEDSAMYFCARGKVAGMPEAFEIWGQGTKVTVSSASTK |
| | | 21-143_5G12.006 VK1 | TISRFLNWYQQKPGKAPELLIYVASSLQS | GPSVFPLAPSSKSTSGGTAALGCLVKDYFPEPVTVSWNSGALT |
| | | (1-236)(C137(118)I) | GVPSRFSGSGSGTDFTLTISSLQPEDFATY | SGVHTFPAVLQSSGLYSLSSVVTVPSSSLGTQTYICNVNHKPSN |
| | | VL]:: huLLC-C2 + [hu | YCQQSYSTLISFGQGTKLEITRTVAAPSVFI | TKVDKKVEPKSCDKTHTCPPCPAPELLGGPSVFLFPPKPKDTL |
| | | anti-<huGIPR> 21- | FPPSDEQLKSGTASVVCLLNNFYPREAKV | MISRTPEVTCVVVDVSHEDPEVKFNWYVDGVEVHNAKTKPC |
| | | 143_5G12.005 VH3 (1- | QWKVDNALQSGNSQESVTEQDSKDSTYS | EEQYGSTYRCVSVLTVLHQDWLNGKEYKCKVSNKALPAPIEK |
| | | 473)(141I, I58I) | LSSTLTLSKADYEKHKVYACEVTHQGLSS | TISKAKGQPREPQVYTLPPSREEMTKNQVSLTCLVKGFYPSDIA |
| | | VH]:: huIgG1zSEFL2-2 | PVTKSFNRGEC (SEQ ID NO: 3564) | VEWESNGQPENNYKTTPPVLDSDGSFFLYSKLTVDKSRWQQG |
| | | (mAb-fusion) | | NVFSCSVMHEALHNHYTQKSLSLSPGK (SEQ ID NO: 3855) |
| PL- | iPS: | huGLP1(Hyb):: | HGEGTFTSDVSSYLEGEAVRLFIEWLKNGGPSSGAPPPSGAPAP | DIQLTQSPSSLSASVGDRVTITCRASQTIS |
| 50531 | 476664 | (AP)10::[hu anti- | APAPAPAPAPAPAPAPGQVQLVESGGGVVQPGRSLRLSCTASG | RFLNWYQQKPGKAPELLIYVASSLQSGV |
| | | <huGIPR> 21- | FTFSSYGIHWVRQAPGKGLEWVAVIWYDGSNKFHADSVKGRF | PSRFSGSGSGTDFTLTISSLQPEDFATYYC |
| | | 143_5G12.005 VH3 (1- | TISRDNSKNTLYLQMNSLRAEDSAMYFCARGKVAGMPEAFEI | QQSYSTLISFGQGTKLEITRTVAAPSVFIF |
| | | 473)(141I, I58I) | WGQGTKVTVSSASTKGPSVFPLAPSSKSTSGGTAALGCLVKDY | PPSDEQLKSGTASVVCLLNNFYPREAKV |
| | | VH]:: huIgG1zSEFL2-2 | FPEPVTVSWNSGALTSGVHTFPAVLQSSGLYSLSSVVTVPSSSL | QWKVDNALQSGNSQESVTEQDSKDSTY |
| | | + [hu anti-<huGIPR> | GTQTYICNVNHKPSNTKVDKKVEPKSCDKTHTCPPCPAPELLG | SLSSTLTLSKADYEKHKVYACEVTHQGL |
| | | 21-143_5G12.006 VK1 | GPSVFLFPPKPKDTLMISRTPEVTCVVVDVSHEDPEVKFNWYV | SSPVTKSFNRGEC (SEQ ID NO: 3856) |
| | | (1-236)(C137(118)I) | DGVEVHNAKTKPCEEQYGSTYRCVSVLTVLHQDWLNGKEYK | |
| | | VL]:: huKLC-CL (mAb- | CKVSNKALPAPIEKTISKAKGQPREPQVYTLPPSREEMTKNQVS | |
| | | fusion) | LTCLVKGFYPSDIAVEWESNGQPENNYKTTPPVLDSDGSFFLYS | |
| | | | KLTVDKSRWQQGNVFSCSVMHEALHNHYTQKSLSLSPGK | |
| | | | (SEQ ID NO: 3565) | |
| PL- | iPS: | huGLP1(Hyb):: | HGEGTFTSDVSSYLEGEAVRLFIEWLKN | QVQLVESGGGVVQPGRSLRLSCTASGFTFSSYGIHWVRQAPGKG |
| 50532 | 476665 | (AP)10::[hu anti- | GGPSSGAPPPSGAPAPAPAPAPAPAPAP | LEWVAVIWYDGSNKFHADSVKGRFTISRDNSKNTLYLQMNSLR |
| | | <huGIPR> 21- | APAPGDIQLTQSPSSLSASVGDRVTITCR | AEDSAMYFCARGKVAGMPEAFEIWGQGTKVTVSSASTKGPSVF |
| | | 143_5G12.006 VK1 (1- | ASQTISRFLNWYQQKPGKAPELLIYVAS | PLAPSSKSTSGGTAALGCLVKDYFPEPVTVSWNSGALTSGVHTF |
| | | 236)(C137(118)I) | SLQSGVPSRFSGSGSGTDFTLTISSLQPE | PAVLQSSGLYSLSSVVTVPSSSLGTQTYICNVNHKPSNTKVDKKV |
| | | VL]:: huLLC-C2 + [hu | DFATYYCQQSYSTLISFGQGTKLEITRT | EPKSCDKTHTCPPCPAPELLGGPSVFLFPPKPKDTLMISRTPEVTC |
| | | anti-<huGIPR> 21- | VAAPSVFIFPPSDEQLKSGTASVVCLLN | VVVDVSHEDPEVKFNWYVDGVEVHNAKTKPCEEQYGSTYRCV |
| | | 143_5G12.005 VH3 (1- | NFYPREAKVQWKVDNALQSGNSQESV | SVLTVLHQDWLNGKEYKCKVSNKALPAPIEKTISKAKGQPREPQ |
| | | 473)(141I, I58I) | TEQDSKDSTYSLSSTLTLSKADYEKHKV | VYTLPPSREEMTKNQVSLTCLVKGFYPSDIAVEWESNGQPENNY |
| | | VH]:: huIgG1zSEFL2-2 | YACEVTHQGLSSPVTKSFNRGEC (SEQ | KTTPPVLDSDGSFFLYSKLTVDKSRWQQGNVFSCSVMHEALHN |
| | | (mAb-fusion) | ID NO: 3566) | HYTQKSLSLSPGK (SEQ ID NO: 3857) |
| PL- | iPS: | huGLP1(Hyb):: | HGEGTFTSDVSSYLEGEAVRLFIEWLKNGGPSSGAPPPSGGGGA | DIQLTQSPSSLSASVGDRVTITCRASQTIS |
| 50533 | 476666 | (G4A)3::G4:: [hu | GGGGAGGGGAGGGGQVQLVESGGGVVQPGRSLRLSCTASGFT | RFLNWYQQKPGKAPELLIYVASSLQSGV |
| | | anti-<huGIPR> | FSSYGIHWVRQAPGKGLEWVAVIWYDGSNKFHADSVKGRFTIS | PSRFSGSGSGTDFTLTISSLQPEDFATYYC |
| | | 21-143_5G12.005 VH3 | RDNSKNTLYLQMNSLRAEDSAMYFCARGKVAGMPEAFEIWG | QQSYSTLISFGQGTKLEITRTVAAPSVFIF |
| | | (1-473)(141I, I58I) | QGTKVTVSSASTKGPSVFPLAPSSKSTSGGTAALGCLVKDYFPE | PPSDEQLKSGTASVVCLLNNFYPREAKV |
| | | VH]:: huIgG1zSEFL2-2 | PVTVSWNSGALTSGVHTFPAVLQSSGLYSLSSVVTVPSSSLGTQ | QWKVDNALQSGNSQESVTEQDSKDSTY |
| | | + [hu anti-<huGIPR> | TYICNVNHKPSNTKVDKKVEPKSCDKTHTCPPCPAPELLGGPSV | SLSSTLTLSKADYEKHKVYACEVTHQGL |
| | | 21-143_5G12.006 VK1 | FLFPPKPKDTLMISRTPEVTCVVVDVSHEDPEVKFNWYVDGVE | SSPVTKSFNRGEC (SEQ ID NO: 3858) |
| | | (1-236)(C137(118)I) | VHNAKTKPCEEQYGSTYRCVSVLTVLHQDWLNGKEYKCKVS | |
| | | VL]:: huKLC-CL (mAb- | NKALPAPIEKTISKAKGQPREPQVYTLPPSREEMTKNQVSLTCL | |
| | | fusion) | VKGFYPSDIAVEWESNGQPENNYKTTPPVLDSDGSFFLYSKLTV | |
| | | | DKSRWQQGNVFSCSVMHEALHNHYTQKSLSLSPGK (SEQ ID | |
| | | | NO: 3567) | |
| PL- | iPS: | huGLP1(Hyb):: | HGEGTFTSDVSSYLEGEAVRLFIEWLK | QVQLVESGGGVVQPGRSLRLSCTASGFTFSSYGIHWVRQAPGKG |
| 50534 | 476667 | (G4A)3:: G4:: [hu | NGGPSSGAPPPSGGGGAGGGGAGGGG | LEWVAVIWYDGSNKFHADSVKGRFTISRDNSKNTLYLQMNSLRA |
| | | anti-<huGIPR> | AGGGGDIQLTQSPSSLSASVGDRVTITC | EDSAMYFCARGKVAGMPEAFEIWGQGTKVTVSSASTKGPSVFPL |
| | | 21-143_5G12.006 VK1 | RASQTISRFLNWYQQKPGKAPELLIYV | APSSKSTSGGTAALGCLVKDYFPEPVTVSWNSGALTSGVHTFPAV |
| | | (1-236)(C137(118)I) | ASSLQSGVPSRFSGSGSGTDFTLTISSLQ | LQSSGLYSLSSVVTVPSSSLGTQTYICNVNHKPSNTKVDKKVEPKS |
| | | VL]:: huLLC-C2 + [hu | PEDFATYYCQQSYSTLISFGQGTKLEIT | CDKTHTCPPCPAPELLGGPSVFLFPPKPKDTLMISRTPEVTCVVVD |
| | | anti-<huGIPR> 21- | RTVAAPSVFIFPPSDEQLKSGTASVVCL | VSHEDPEVKFNWYVDGVEVHNAKTKPCEEQYGSTYRCVSVLTV |
| | | 143_5G12.005 VH3 (1- | LNNFYPREAKVQWKVDNALQSGNSQE | LHQDWLNGKEYKCKVSNKALPAPIEKTISKAKGQPREPQVYTLPP |
| | | 473)(141I, I58I) | SVTEQDSKDSTYSLSSTLTLSKADYEK | SREEMTKNQVSLTCLVKGFYPSDIAVEWESNGQPENNYKTTPPVL |
| | | VH]:: huIgG1zSEFL2-2 | HKVYACEVTHQGLSSPVTKSFNRGEC | DSDGSFFLYSKLTVDKSRWQQGNVFSCSVMHEALHNHYTQKSLS |
| | | (mAb-fusion) | (SEQ ID NO: 3568) | LSPGK (SEQ ID NO: 3859) |
| PL- | iPS: | huGLP1(Ana1):: | HGEGTFTSDVSSYLEEQAAKEFIEWLVKGGGGSGSATGGSGSV | EIVMTQSPATLSVSPGERATLSCRASQSV |
| 51752 | 478187 | 1KmodT482V, M493L):: | ASSGSGSATHLQVQLVESGGGVVQPGRSLRLSCAASGFTFSNY | SSNLAWYQQKPGQAPRLLIYGAATRATG |
| PL- | | [hu anti-<huGIPR> | GMHWVRQAPGEGLEWVAAIWFDASDKYYADAVKGRFTISRD | IPARVSGSGSGTEFTLTISSLQSEDFAVYY |
| 51753 | | 21-143_2G10 LC1.003 | NSKNTLYLQMNSLRAEDTAVYYCARDQAIFGVVPDYWGQGTL | CQQYNNWPLTFGGGTKVEIKRTVAAPSV |
| PL- | | VH3 (1-472) | VTVSSASTKGPSVFPLAPSSKSTSGGTAALGCLVKDYFPEPVTV | FIFPPSDEQLKSGTASVVCLLNNFYPREA |
| 51768 | | (S73(85)A, | SWNSGALTSGVHTFPAVLQSSGLYSLSSVVTVPSSSLGTQTYICK | VQWKVDNALQSGNSQESVTEQDSKDS |
| | | G65(77)A) | NVNHKPSNTKVDKKVEPKSCDKTHTCPPCPAPELLGGPSVFLFP | TYSLSSTLTLSKADYEKHKVYACEVTHQ |
| | | VH]:: huIgG1zSEFL2-2 | PKPKDTLMISRTPEVTCVVVDVSHEDPEVKFNWYVDGVEVHN | GLSSPVTKSFNRGEC (SEQ ID NO: 3860) |
| | | + [hu anti-<huGIPR> | AKTKPCEEQYGSTYRCVSVLTVLHQDWLNGKEYKCKVSNKAL | |
| | | 21-143_2G10 LC1 VK3 | PAPIEKTISKAKGQPREPQVYTLPPSREEMTKNQVSLTCLVKGF | |
| | | (1-236) VL]:: huKLC- | YPSDIAVEWESNGQPENNYKTTPPVLDSDGSFFLYSKLTVDKSR | |
| | | CL (mAb-fusion) | WQQGNVFSCSVMHEALHNHYTQKSLSLSPGK (SEQ ID NO: | |
| | | | 3569) | |
| PL- | iPS: | huGLP1(Ana1): | HGEGTFTSDVSSYLEEQAAKEFIEWLVK | QVQLVESGGGVVQPGRSLRLSCAASGFTFSNYGMHWVRQAPGE |
| 51754 | 478188 | 1KmodT482V, M493L):: | GGGGSGSATGGSGSVASSGSGSATHLEI | GLEWVAAIWFDASDKYYADAVKGRFTISRDNSKNTLYLQMNSL |
| PL- | | [hu anti-<huGIPR> | VMTQSPATLSVSPGERATLSCRASQSVS | RAEDTAVYYCARDQAIFGVVPDYWGQGTLVTVSSASTKGPSVF |
| 51761 | | 21-143_2G10_LC1 VK3 | SNLAWYQQKPGQAPRLLIYGAATRATG | PLAPSSKSTSGGTAALGCLVKDYFPEPVTVSWNSGALTSGVHTF |
| | | (1-236) VL]:: huKLC- | IPARVSGSGSGTEFTLTISSLQSEDFAVY | PAVLQSSGLYSLSSVVTVPSSSLGTQTYICNVNHKPSNTKVDKKV |
| | | CL + [hu anti- | YCQQYNNWPLTFGGGTKVEIKRTVAAP | EPKSCDKTHTCPPCPAPELLGGPSVFLFPPKPKDTLMISRTPEVTC |
| | | <huGIPR> 21-143_ | SVFIFPPSDEQLKSGTASVVCLLNNFYPR | VVVDVSHEDPEVKFNWYVDGVEVHNAKTKPCEEQYGSTYRCV |
| | | 2G10_LC1.003 VH3 (1- | EAKVQWKVDNALQSGNSQESVTEQDS | SVLTVLHQDWLNGKEYKCKVSNKALPAPIEKTISKAKGQPREPQ |
| | | 472)(S73(85)A, | KDSTYSLSSTLTLSKADYEKHKVYACE | VYTLPPSREEMTKNQVSLTCLVKGFYPSDIAVEWESNGQPENNY |
| | | G65(77)A) | VTHQGLSSPVTKSFNRGEC (SEQ ID NO: | KTTPPVLDSDGSFFLYSKLTVDKSRWQQGNVFSCSVMHEALHN |
| | | VH]:: huIgG1zSEFL2-2 | 3570) | HYTQKSLSLSPGK (SEQ ID NO: 3861) |
| | | (mAb-fusion) | | |
| PL- | iPS: | huGLP1(Anal):: | HGEGTFTSDVSSYLEEQAAKEFIEWLVKGGGGGGGAGGGGAG | EIVMTQSPATLSVSPGERATLSCRASQSV |
| 51751 | 478189 | :(G4A)3: G4:: [hu | GGGAGGGGQVQLVESGGGVVQPGRSLRLSCAASGFTFSNYGM | SSNLAWYQQKPGQAPRLLIYGAATRATG |
| PL- | | anti-<huGIPR> 21- | HWVRQAPGEGLEWVAAIWFDASDKYYADAVKGRFTISRDNSK | IPARVSGSGSGTEFTLTISSLQSEDFAVYY |
| 51756 | | 143_2G10_LC1.003 | NTLYLQMNSLRAEDTAVYYCARDQAIFGVVPDYWGQGTLVT | CQQYNNWPLTFGGGTKVEIKRTVAAPSV |
| PL- | | VH3 (1-472) | VSSASTKGPSVFPLAPSSKSTSGGTAALGCLVKDYFPEPVTVSW | FIFPPSDEQLKSGTASVVCLLNNFYPREA |
| 51767 | | (S73(85)A, | NSGALTSGVHTFPAVLQSSGLYSLSSVVTVPSSSLGTQTYICNV | KVQWKVDNALQSGNSQESVTEQDSKDS |
| | | G65(77)A) | NHKPSNTKVDKKVEPKSCDKTHTCPPCPAPELLGGPSVFLFPPK | TYSLSSTLTLSKADYEKHKVYACEVTHQ |
| | | VH]:: huIgG1zSEFL2-2 | PKDTLMISRTPEVTCVVVDVSHEDPEVKFNWYVDGVEVHNAK | GLSSPVTKSFNRGEC (SEQ ID NO: 3862) |
| | | + [hu anti-<huGIPR> | TKPCEEQYGSTYRCVSVLTVLHQDWLNGKEYKCKVSNKALPA | |
| | | 21-143 2G10 LC1 VK3 | PIEKTISKAKGQPREPQVYTLPPSREEMTKNQVSLTCLVKGFYP | |
| | | (1-236) VL]:: huKLC- | SDIAVEWESNGQPENNYKTTPPVLDSDGSFFLYSKLTVDKSRW | |
| | | CL (mAb-fusion) | QQGNVFSCSVMHEALHNHYTQKSLSLSPGK (SEQ ID NO: 3571) | |
| PL- | iPS: | huGLP1(Ana1):: | HGEGTFTSDVSSYLEEQAAKEFIEWLVKGGGGGGGA | QVQLVESGGGVVQPGRSLRLSCAASGFTFSNYGM |
| 51757 | 478190 | (G4A)3:: G4:: [hu | GGGGAGGGGAGGGGEIVMTQSPATLSVSPGERATLS | HWVRQAPGEGLEWVAAIWFDASDKYYADAVKGR |
| PL- | | anti-<huGIPR> 21- | CRASQSVSSNLAWYQQKPGQAPRLLIYGAATRATGI | FTISRDNSKNTLYLQMNSLRAEDTAVYYCARDQAI |
| 51762 | | 143_2G10 LC1 VK3 | PARVSGSGSGTEFTLTISSLQSEDFAVYYCQQYNNWP | FGVVPDYWGQGTLVTVSSASTKGPSVFPLAPSSKS |
| | | (1-236) VL]:: huKLC- | LTFGGGTKVEIKRTVAAPSVFIFPPSDEQLKSGTASVV | TSGGTAALGCLVKDYFPEPVTVSWNSGALTSGVHT |
| | | CL + [hu anti- | CLLNNFYPREAKVQWKVDNALQSGNSQESVTEQDS | FPAVLQSSGLYSLSSVVTVPSSSLGTQTYICNVNHK |
| | | <huGIPR> 21-143_ | KDSTYSLSSTLTLSKADYEKHKVYACEVTHQGLSSP | PSNTKVDKKVEPKSCDKTHTCPPCPAPELLGGPSVF |
| | | 2G10 LC1.003 VH3 (1- | VTKSFNRGEC (SEQ ID NO: 3572) | LFPPKPKDTLMISRTPEVTCVVVDVSHEDPEVKFN |
| | | 472)(S73(85)A, | | WYVDGVEVHNAKTKPCEEQYGSTYRCVSVLTVLH |
| | | G65(77)A) | | QDWLNGKEYKCKVSNKALPAPIEKTISKAKGQPRE |
| | | VH]:: huIgG1zSEFL2-2 | | PQVYTLPPSREEMTKNQVSLTCLVKGFYPSDIAVE |
| | | (mAb-fusion) | | WESNGQPENNYKTTPPVLDSDGSFFLYSKLTVDKS |
| | | | | RWQQGNVFSCSVMHEALHNHYTQKSLSLSPGK |
| | | | | (SEQ ID NO: 3863) |
| PL- | iPS: | huGLP1(Inc):: | HGEGTFTSDYSSYLEEQAAKEFIEWLKNGGGGSGSATGGSGSV | EIVMTQSPATLSVSPGERATLSCRASQSV |
| 50353 | 484334 | 1KmodT482V, M493L):: | ASSGSGSATHLQVQLVESGGGVVQPGRSLRLSCAASGFTFSNY | SSNLAWYQQKPGQAPRLLIYGAATRATG |
| PL- | | [hu anti-<huGIPR> | GMHWVRQAPGEGLEWVAAIWFDASDKYYADAVKGRFTISRD | IPARVSGSGSGTEFTLTISSLQSEDFAVYY |
| 50366 | | 21-143_2G10 LC1.003 | NSKNTLYLQMNSLRAEDTAVYYCARDQAIFGVVPDYWGQGTL | CQQYNNWPLTFGGGTKVEIKRTVAAPSV |
| | | VH3 (1-472) | VTVSSASTKGPSVFPLAPSSKSTSGGTAALGCLVKDYFPEPVTV | FIFPPSDEQLKSGTASVVCLLNNFYPREA |
| | | (S73(85)A, | SWNSGALTSGVHTFPAVLQSSGLYSLSSVVTVPSSSLGTQTYIC | KVQWKVDNALQSGNSQESVTEQDSKDS |
| | | G65(77)A) | NVNHKPSNTKVDKKVEPKSCDKTHTCPPCPAPELLGGPSVFLFP | TYSLSSTLTLSKADYEKHKVYACEVTHQ |
| | | VH]:: huIgG1zSEFL2-2 | PKPKDTLMISRTPEVTCVVVDVSHEDPEVKFNWYVDGVEVHN | GLSSPVTKSFNRGEC (SEQ ID NO: 3864) |
| | | + [hu anti-<huGIPR> | AKTKPCEEQYGSTYRCVSVLTVLHQDWLNGKEYKCKVSNKAL | |
| | | 21-143_2G10_LC1 VK3 | PAPIEKTISKAKGQPREPQVYTLPPSREEMTKNQVSLTCLVKGF | |
| | | (1-236) VL]:: huKLC- | YPSDIAVEWESNGQPENNYKTTPPVLDSDGSFFLYSKLTVDKSR | |
| | | CL (mAb-fusion) | WQQGNVFSCSVMHEALHNHYTQKSLSLSPGK (SEQ ID NO: | |
| | | | 3573) | |
| PL- | iPS: | huGLP1(Inc):: | HGEGTFTSDYSSYLEEQAAKEFIEWLKNGGGGSG | QVQLVESGGGVVQPGRSLRLSCAASGFTFSNYGMHW |
| 50354 | 484335 | 1Klinkermod:: [hu | SATGGSGSVASSGSGSATHLEIVMTQSPATLSVSP | VRQAPGEGLEWVAAIWFDASDKYYADAVKGRFTISR |
| PL- | | anti-<huGIPR> 21- | GERATLSCRASQSVSSNLAWYQQKPGQAPRLLIY | DNSKNTLYLQMNSLRAEDTAVYYCARDQAIFGVVPD |
| 50367 | | 143_2G10 LC1.003 | GAATRATGIPARVSGSGSGTEFTLTISSLQSEDFAV | YWGQGTLVTVSSASTKGPSVFPLAPSSKSTSGGTAAL |
| | | VH3 (1-236) | YYCQQYNNWPLTFGGGTKVEIKRTVAAPSVFIFPP | GCLVKDYFPEPVTVSWNSGALTSGVHTFPAVLQSSGL |
| | | VL]:: huKLC-CL + [hu | SDEQLKSGTASVVCLLNNFYPREAKVQWKVDNA | YSLSSVVTVPSSSLGTQTYICNVNHKPSNTKVDKKVEP |
| | | anti-<huGIPR> 21- | LQSGNSQESVTEQDSKDSTYSLSSTLTLSKADYEK | KSCDKTHTCPPCPAPELLGGPSVFLFPPKPKDTLMISRT |
| | | 143_2G10 LC1.003 | HKVYACEVTHQGLSSPVTKSFNRGEC (SEQ ID | PEVTCVVVDVSHEDPEVKFNWYVDGVEVHNAKTKPC |
| | | VH3 (1-472) | NO: 3574) | EEQYGSTYRCVSVLTVLHQDWLNGKEYKCKVSNKAL |
| | | (S73(85)A, | | PAPIEKTISKAKGQPREPQVYTLPPSREEMTKNQVSLT |
| | | G65(77)A) | | CLVKGFYPSDIAVEWESNGQPENNYKTTPPVLDSDGS |
| | | VH]:: huIgG1zSEFL2-2 | | FFLYSKLTVDKSRWQQGNVFSCSVMHEALHNHYTQK |
| | | (mAb-fusion) | | SLSLSPGK (SEQ ID NO: 3865) |
| PL- | iPS: | huGLP1(Inc):: | HGEGTFTSDYSSYLEEQAAKEFIEWLKNGGGGAPAPAPAPAPAPAPAPAPA | EIVMTQSPATLSVSPGERATLS |
| 50355 | 484351 | (AP)10:: [hu anti- | PGQVQLVESGGGVVQPGRSLRLSCAASGFTFSNYGMHWVRQAPGEGLEW | CRASQSVSSNLAWYQQKPGQ |
| PL- | | <huGIPR> 21- | VAAIWFDASDKYYADAVKGRFTISRDNSKNTLYLQMNSLRAEDTAVYYC | APRLLIYGAATRATGIPARVS |
| 50368 | | 143_2G10_LC1.003 VH3 | ARDQAIFGVVPDYWGQGTLVTVSSASTKGPSVFPLAPSSKSTSGGTAALGC | GSGSGTEFTLTISSLQSEDFAV |
| | | (1-472)(S73(85)A, | LVKDYFPEPVTVSWNSGALTSGVHTFPAVLQSSGLYSLSSVVTVPSSSLGT | YYCQQYNNWPLTFGGGTKVE |
| | | G65(77)A) | QTYICNVNHKPSNTKVDKKVEPKSCDKTHTCPPCPAPELLGGPSVFLFPPKP | IKRTVAAPSVFIFPPSDEQLKS |
| | | VH]:: huIgG1zSEFL2-2 | KDTLMISRTPEVTCVVVDVSHEDPEVKFNWYVDGVEVHNAKTKPCEEQY | GTASVVCLLNNFYPREAKVQ |
| | | + [hu anti-<huGIPR> | GSTYRCVSVLTVLHQDWLNGKEYKCKVSNKALPAPIEKTISKAKGQPREP | WKVDNALQSGNSQESVTEQD |
| | | 21-143_2G10 LC1 VK3 | QVYTLPPSREEMTKNQVSLTCLVKGFYPSDIAVEWESNGQPENNYKTTPPV | SKDSTYSLSSTLTLSKADYEK |
| | | (1-236) VL]:: huKLC- | LDSDGSFFLYSKLTVDKSRWQQGNVFSCSVMHEALHNHYTQKSLSLSPGK | HKVYACEVTHQGLSSPVTKSF |
| | | CL (mAb-fusion) | (SEQ ID NO: 3575) | NRGEC (SEQ ID NO: 3866) |
| PL- | iPS: | huGLP1(Inc):: | HGEGTFTSDYSSYLEEQAAKEFIE | QVQLVESGGGVVQPGRSLRLSCAASGFTFSNYGMHWVRQAPGEGLEW |
| 50356 | 484352 | (AP)10:: [hu anti- | WLKNGGGGAPAPAPAPAPAPAP | VAAIWFDASDKYYADAVKGRFTISRDNSKNTLYLQMNSLRAEDTAVY |
| PL- | | <huGIPR> 21-143_ | APAPAPGEIVMTQSPATLSVSPGE | YCARDQAIFGVVPDYWGQGTLVTVSSASTKGPSVFPLAPSSKSTSGGT |
| 50369 | | 2G10 LC1.003 VH3(1- | RATLSCRASQSVSSNLAWYQQKP | AALGCLVKDYFPEPVTVSWNSGALTSGVHTFPAVLQSSGLYSLSSVVT |
| | | 236) VL]:: huKLC-CL | GQAPRLLIYGAATRATGIPARVSG | VPSSSLGTQTYICNVNHKPSNTKVDKKVEPKSCDKTHTCPPCPAPELLG |
| | | + [hu anti-<huGIPR> | SGSGTEFTLTISSLQSEDFAVYYC | GPSVFLFPPKPKDTLMISRTPEVTCVVVDVSHEDPEVKFNWYVDGVEV |
| | | 21-143_2G10_LC1.003 | QQYNNWPLTFGGGTKVEIKRTVA | HNAKTKPCEEQYGSTYRCVSVLTVLHQDWLNGKEYKCKVSNKALPAP |
| | | VH3 (1-472) | APSVFIFPPSDEQLKSGTASVVCL | IEKTISKAKGQPREPQVYTLPPSREEMTKNQVSLTCLVKGFYPSDIAVE |
| | | (S73(85)A, | LNNFYPREAKVQWKVDNALQSG | WESNGQPENNYKTTPPVLDSDGSFFLYSKLTVDKSRWQQGNVFSCSV |
| | | G65(77)A) | NSQESVTEQDSKDSTYSLSSTLTL | MHEALHNHYTQKSLSLSPGK (SEQ ID NO: 3867) |
| | | VH]:: huIgG1zSEFL2-2 | SKADYEKHKVYACEVTHQGLSSP | |
| | | (mAb-fusion) | VTKSFNRGEC (SEQ ID NO: 3576) | |
| PL- | iPS: | huGLP1(Inc):: | HGEGTFTSDYSSYLEEQAAKEFIEWLKNGGGGGGGAGGGGAGGGGAGGG | EIVMTQSPATLSVSPGERATLS |
| 50357 | 484353 | (G4A)3:: G4:: [hu | GQVQLVESGGGVVQPGRSLRLSCAASGFTFSNYGMHWVRQAPGEGLEWV | CRASQSVSSNLAWYQQKPGQ |
| PL- | | anti-<huGIPR> 21- | AAIWFDASDKYYADAVKGRFTISRDNSKNTLYLQMNSLRAEDTAVYYCA | APRLLIYGAATRATGIPARVS |
| 50370 | | 143_2G10_LC1.003 VH3 | RDQAIFGVVPDYWGQGTLVTVSSASTKGPSVFPLAPSSKSTSGGTAALGCL | GSGSGTEFTLTISSLQSEDFAV |
| | | (1-472)(S73(85)A, | VKDYFPEPVTVSWNSGALTSGVHTFPAVLQSSGLYSLSSVVTVPSSSLGTQ | YYCQQYNNWPLTFGGGTKVE |
| | | G65(77)A) | TYICNVNHKPSNTKVDKKVEPKSCDKTHTCPPCPAPELLGGPSVFLFPPKP | IKRTVAAPSVFIFPPSDEQLKS |
| | | VH]:: huIgG1zSEFL2-2 | KDTLMISRTPEVTCVVVDVSHEDPEVKFNWYVDGVEVHNAKTKPCEEQYGS | GTASVVCLLNNFYPREAKVQ |
| | | + [hu anti-<huGIPR> | TYRCVSVLTVLHQDWLNGKEYKCKVSNKALPAPIEKTISKAKGQPREPQV | WKVDNALQSGNSQESVTEQD |
| | | 21-143_2G10 LC1 VK3 | YTLPPSREEMTKNQVSLTCLVKGFYPSDIAVEWESNGQPENNYKTTPPVLD | SKDSTYSLSSTLTLSKADYEK |
| | | (1-236) VL]:: huKLC- | SDGSFFLYSKLTVDKSRWQQGNVFSCSVMHEALHNHYTQKSLSLSPGK | HKVYACEVTHQGLSSPVTKSF |
| | | CL (mAb-fusion) | (SEQ ID NO: 3577) | NRGEC (SEQ ID NO: 3868) |
| PL- | iPS: | huGLP1(Inc):: | HGEGTFTSDYSSYLEEQAAKEFIE | QVQLVESGGGVVQPGRSLRLSCAASGFTFSNYGMHWVRQAPGEGLEW |
| 50358 | 484354 | (G4A)3:: G4:: [hu | WLKNGGGGGGGAGGGGAGGGG | VAAIWFDASDKYYADAVKGRFTISRDNSKNTLYLQMNSLRAEDTAVY |
| PL- | | anti-<huGIPR> 21- | AGGGGEIVMTQSPATLSVSPGER | YCARDQAIFGVVPDYWGQGTLVTVSSASTKGPSVFPLAPSSKSTSGGT |
| 50371 | | 143_2G10 LC1.003 VH3 | ATLSCRASQSVSSNLAWYQQKPG | AALGCLVKDYFPEPVTVSWNSGALTSGVHTFPAVLQSSGLYSLSSVVT |
| | | (1-236)VL]:: huKLC- | QAPRLLIYGAATRATGIPARVSGS | VPSSSLGTQTYICNVNHKPSNTKVDKKVEPKSCDKTHTCPPCPAPELLG |
| | | CL + [hu anti- | GSGTEFTLTISSLQSEDFAVYYCQ | GPSVFLFPPKPKDTLMISRTPEVTCVVVDVSHEDPEVKFNWYVDGVEV |
| | | <huGIPR> 21-143_ | QYNNWPLTFGGGTKVEIKRTVAA | HNAKTKPCEEQYGSTYRCVSVLTVLHQDWLNGKEYKCKVSNKALPAP |
| | | 2G10 LC1.003 VH3 (1- | PSVFIFPPSDEQLKSGTASVVCLL | IEKTISKAKGQPREPQVYTLPPSREEMTKNQVSLTCLVKGFYPSDIAVE |
| | | 472)(S73(85)A, | NNFYPREAKVQWKVDNALQSGN | WESNGQPENNYKTTPPVLDSDGSFFLYSKLTVDKSRWQQGNVFSCSV |
| | | G65(77)A) | SQESVTEQDSKDSTYSLSSTLTLS | MHEALHNHYTQKSLSLSPGK (SEQ ID NO: 3869) |
| | | VH]:: huIgG1zSEFL2-2 | KADYEKHKVYACEVTHQGLSSP | |
| | | (mAb-fusion) | VTKSFNRGEC (SEQ ID NO: 3578) | |
| PL- | iPS: | huGLP1(Low):: | HGEGTFTSEVSSYLEGQAAKEFIEWLKNGGGGSGSATGGSGSVASSGSGSA | EIVMTQSPATLSVSPGERATLS |
| 50359 | 484387 | 1KmodT482V, M493L):: | THLQVQLVESGGGVVQPGRSLRLSCAASGFTFSNYGMHWVRQAPGEGLE | CRASQSVSSNLAWYQQKPGQ |
| PL- | | [hu anti-<huGIPR> | WVAAIWFDASDKYYADAVKGRFTISRDNSKNTLYLQMNSLRAEDTAVYY | APRLLIYGAATRATGIPARVS |
| 50372 | | 21-143_2G10_LC1.003 | CARDQAIFGVVPDYWGQGTLVTVSSASTKGPSVFPLAPSSKSTSGGTAALG | GSGSGTEFTLTISSLQSEDFAV |
| | | VH3 (1-472) | CLVKDYFPEPVTVSWNSGALTSGVHTFPAVLQSSGLYSLSSVVTVPSSSLGT | YYCQQYNNWPLTFGGGTKVE |
| | | (S73(85)A, | QTYICNVNHKPSNTKVDKKVEPKSCDKTHTCPPCPAPELLGGPSVFLFPPKP | IKRTVAAPSVFIFPPSDEQLKS |
| | | G65(77)A) | KDTLMISRTPEVTCVVVDVSHEDPEVKFNWYVDGVEVHNAKTKPCEEQY | GTASVVCLLNNFYPREAKVQ |
| | | VH]:: huIgG1zSEFL2-2 | GSTYRCVSVLTVLHQDWLNGKEYKCKVSNKALPAPIEKTISKAKGQPREP | WKVDNALQSGNSQESVTEQD |
| | | + [hu anti-<huGIPR> | QVYTLPPSREEMTKNQVSLTCLVKGFYPSDIAVEWESNGQPENNYKTTPPV | SKDSTYSLSSTLTLSKADYEK |
| | | 21-143_2G10_LC1 VK3 | LDSDGSFFLYSKLTVDKSRWQQGNVFSCSVMHEALHNHYTQKSLSLSPGK | HKVYACEVTHQGLSSPVTKSF |
| | | (1-236) VL]:: huKLC- | (SEQ ID NO: 3579) | NRGEC (SEQ ID NO: 3870) |
| | | CL (mAb-fusion) | | |
| PL- | iPS: | huGLP1(Low):: | HGEGTFTSEVSSYLEGQAAKEFIE | QVQLVESGGGVVQPGRSLRLSCAASGFTFSNYGMHWVRQAPGEGLEW |
| 50360 | 484389 | 1KmodT482V ,M493L):: | WLKNGGGGSGSATGGSGSVASS | VAAIWFDASDKYYADAVKGRFTISRDNSKNTLYLQMNSLRAEDTAVY |
| PL- | | [hu anti-<huGIPR> | GSGSATHLEIVMTQSPATLSVSPG | YCARDQAIFGVVPDYWGQGTLVTVSSASTKGPSVFPLAPSSKSTSGGT |
| 50373 | | 21-143_2G10 LC1.003 | ERATLSCRASQSVSSNLAWYQQK | AALGCLVKDYFPEPVTVSWNSGALTSGVHTFPAVLQSSGLYSLSSVVT |
| | | VH3 (1-236) | PGQAPRLLIYGAATRATGIPARVS | VPSSSLGTQTYICNVNHKPSNTKVDKKVEPKSCDKTHTCPPCPAPELLG |
| | | VL]:: huKLC-CL + [hu | GSGSGTEFTLTISSLQSEDFAVYY | GPSVFLFPPKPKDTLMISRTPEVTCVVVDVSHEDPEVKFNWYVDGVEV |
| | | anti-<huGIPR> 21- | CQQYNNWPLTFGGGTKVEIKRTV | HNAKTKPCEEQYGSTYRCVSVLTVLHQDWLNGKEYKCKVSNKALPAP |
| | | 143_2G10 LC1.003 | AAPSVFIFPPSDEQLKSGTASVVC | IEKTISKAKGQPREPQVYTLPPSREEMTKNQVSLTCLVKGFYPSDIAVE |
| | | VH3 (1-472) | LLNNFYPREAKVQWKVDNALQS | WESNGQPENNYKTTPPVLDSDGSFFLYSKLTVDKSRWQQGNVFSCSV |
| | | (S73(85)A, | GNSQESVTEQDSKDSTYSLSSTLT | MHEALHNHYTQKSLSLSPGK (SEQ ID NO: 3871) |
| | | G65(77)A) | LSKADYEKHKVYACEVTHQGLSS | |
| | | VH]:: huIgG1zSEFL2-2 | PVTKSFNRGEC (SEQ ID NO: 3580) | |
| | | (mAb-fusion) | | |
| PL- | iPS: | huGLP1(Low):: | HGEGTFTSEVSSYLEGQAAKEFIEWLKNGGGGAPAPAPAPAPAPAPAPAPA | EIVMTQSPATLSVSPGERATLS |
| 50361 | 484391 | (AP)10:: [hu anti- | PGQVQLVESGGGVVQPGRSLRLSCAASGFTFSNYGMHWVRQAPGEGLEW | CRASQSVSSNLAWYQQKPGQ |
| PL- | | <huGIPR> 21-143_ | VAAIWFDASDKYYADAVKGRFTISRDNSKNTLYLQMNSLRAEDTAVYYC | APRLLIYGAATRATGIPARVS |
| 50374 | | 2G10_LC1.003VH3 (1- | ARDQAIFGVVPDYWGQGTLVTVSSASTKGPSVFPLAPSSKSTSGGTAALGC | GSGSGTEFTLTISSLQSEDFAV |
| | | 472)(S73(85)A, | LVKDYFPEPVTVSWNSGALTSGVHTFPAVLQSSGLYSLSSVVTVPSSSLGT | YYCQQYNNWPLTFGGGTKVE |
| | | G65(77)A) | QTYICNVNHKPSNTKVDKKVEPKSCDKTHTCPPCPAPELLGGPSVFLFPPKP | IKRTVAAPSVFIFPPSDEQLKS |
| | | VH]:: huIgG1zSEFL2-2 | KDTLMISRTPEVTCVVVDVSHEDPEVKFNWYVDGVEVHNAKTKPCEEQY | GTASVVCLLNNFYPREAKVQ |
| | | + [hu anti-<huGIPR> | GSTYRCVSVLTVLHQDWLNGKEYKCKVSNKALPAPIEKTISKAKGQPREP | WKVDNALQSGNSQESVTEQD |
| | | 21-143_2G10 LC1 VK3 | QVYTLPPSREEMTKNQVSLTCLVKGFYPSDIAVEWESNGQPENNYKTTPPV | SKDSTYSLSSTLTLSKADYEK |
| | | (1-236) VL]:: huKLC- | LDSDGSFFLYSKLTVDKSRWQQGNVFSCSVMHEALHNHYTQKSLSLSPGK | HKVYACEVTHQGLSSPVTKSF |
| | | CL (mAb-fusion) | (SEQ ID NO: 3581) | NRGEC (SEQ ID NO: 3872) |
| PL- | iPS: | huGLP1(Low):: | HGEGTFTSEVSSYLEGQAAKEFIE | QVQLVESGGGVVQPGRSLRLSCAASGFTFSNYGMHWVRQAPGEGLEW |
| 50362 | 484393 | (AP)10:: [hu anti- | WLKNGGGGAPAPAPAPAPAPAP | VAAIWFDASDKYYADAVKGRFTISRDNSKNTLYLQMNSLRAEDTAVY |
| | | <huGIPR> 21-143_ | APAPAPGEIVMTQSPATLSVSPGE | YCARDQAIFGVVPDYWGQGTLVTVSSASTKGPSVFPLAPSSKSTSGGT |
| | | 2G10 LC1.003 VH3(1- | RATLSCRASQSVSSNLAWYQQKP | AALGCLVKDYFPEPVTVSWNSGALTSGVHTFPAVLQSSGLYSLSSVVT |
| | | 236)VL]:: huKLC-CL + | GQAPRLLIYGAATRATGIPARVSG | VPSSSLGTQTYICNVNHKPSNTKVDKKVEPKSCDKTHTCPPCPAPELLG |
| | | [hu anti-<huGIPR> | SGSGTEFTLTISSLQSEDFAVYYC | GPSVFLFPPKPKDTLMISRTPEVTCVVVDVSHEDPEVKFNWYVDGVEV |
| | | 21-143_2G10 LC1.003 | QQYNNWPLTFGGGTKVEIKRTVA | HNAKTKPCEEQYGSTYRCVSVLTVLHQDWLNGKEYKCKVSNKALPAP |
| | | VH3 (1-472) | APSVFIFPPSDEQLKSGTASVVCL | IEKTISKAKGQPREPQVYTLPPSREEMTKNQVSLTCLVKGFYPSDIAVE |
| | | (S73(85)A, | LNNFYPREAKVQWKVDNALQSG | WESNGQPENNYKTTPPVLDSDGSFFLYSKLTVDKSRWQQGNVFSCSV |
| | | G65(77)A) | NSQESVTEQDSKDSTYSLSSTLTL | MHEALHNHYTQKSLSLSPGK (SEQ ID NO: 3873) |
| | | VH]:: huIgG1zSEFL2-2 | SKADYEKHKVYACEVTHQGLSSP | |
| | | (mAb-fusion) | VTKSFNRGEC (SEQ ID NO: 3582) | |
| PL- | iPS: | huGLP1(Low):: | HGEGTFTSEVSSYLEGQAAKEFIEWLKNGGGGGGGAGGGGAGGGGAGGG | EIVMTQSPATLSVSPGERATLS |
| 50363 | 484395 | (G4A)3:: G4:: [hu | GQVQLVESGGGVVQPGRSLRLSCAASGFTFSNYGMHWVRQAPGEGLEWV | CRASQSVSSNLAWYQQKPGQ |
| | | anti-<huGIPR> 21- | AAIWFDASDKYYADAVKGRFTISRDNSKNTLYLQMNSLRAEDTAVYYCA | APRLLIYGAATRATGIPARVS |
| | | 143_2G10 LC1.003 VH3 | RDQAIFGVVPDYWGQGTLVTVSSASTKGPSVFPLAPSSKSTSGGTAALGCL | GSGSGTEFTLTISSLQSEDFAV |
| | | (1-472)(S73(85)A, | VKDYFPEPVTVSWNSGALTSGVHTFPAVLQSSGLYSLSSVVTVPSSSLGTQ | YYCQQYNNWPLTFGGGTKVE |
| | | G65(77)A) | TYICNVNHKPSNTKVDKKVEPKSCDKTHTCPPCPAPELLGGPSVFLFPPKPK | IKRTVAAPSVFIFPPSDEQLKS |
| | | VH]:: huIgG1zSEFL2-2 | DTLMISRTPEVTCVVVDVSHEDPEVKFNWYVDGVEVHNAKTKPCEEQYGS | GTASVVCLLNNFYPREAKVQ |
| | | + [hu anti-<huGIPR> | TYRCVSVLTVLHQDWLNGKEYKCKVSNKALPAPIEKTISKAKGQPREPQV | WKVDNALQSGNSQESVTEQD |
| | | 21-143_2G10_LC1 VK3 | YTLPPSREEMTKNQVSLTCLVKGFYPSDIAVEWESNGQPENNYKTTPPVLD | SKDSTYSLSSTLTLSKADYEK |
| | | (1-236) VL]:: huKLC- | SDGSFFLYSKLTVDKSRWQQGNVFSCSVMHEALHNHYTQKSLSLSPGK | HKVYACEVTHQGLSSPVTKSF |
| | | CL (mAb-fusion) | (SEQ ID NO: 3583) | NRGEC (SEQ ID NO: 3874) |
| PL- | iPS: | huGLP1(Low):: | HGEGTFTSEVSSYLEGQAAKEFIE | QVQLVESGGGVVQPGRSLRLSCAASGFTFSNYGMHWVRQAPGEGLEW |
| 50364 | 484397 | (G4A)3:: G4:: [hu | WLKNGGGGGGGAGGGGAGGGG | VAAIWFDASDKYYADAVKGRFTISRDNSKNTLYLQMNSLRAEDTAVY |
| | | anti-<huGIPR> 21- | AGGGGEIVMTQSPATLSVSPGER | YCARDQAIFGVVPDYWGQGTLVTVSSASTKGPSVFPLAPSSKSTSGGT |
| | | 143_2G10 LC1.003 VH3 | ATLSCRASQSVSSNLAWYQQKPG | AALGCLVKDYFPEPVTVSWNSGALTSGVHTFPAVLQSSGLYSLSSVVT |
| | | (1-236)VLCDR]:: | QAPRLLIYGAATRATGIPARVSGS | VPSSSLGTQTYICNVNHKPSNTKVDKKVEPKSCDKTHTCPPCPAPELLG |
| | | huKLC-CL + [hu anti- | GSGTEFTLTISSLQSEDFAVYYCQ | GPSVFLFPPKPKDTLMISRTPEVTCVVVDVSHEDPEVKFNWYVDGVEV |
| | | <huGIPR> 21-143_ | QYNNWPLTFGGGTKVEIKRTVAA | HNAKTKPCEEQYGSTYRCVSVLTVLHQDWLNGKEYKCKVSNKALPAP |
| | | 2G10 LC1.003 VH3(1- | PSVFIFPPSDEQLKSGTASVVCLL | IEKTISKAKGQPREPQVYTLPPSREEMTKNQVSLTCLVKGFYPSDIAVE |
| | | 472)(S73(85)A, | NNFYPREAKVQWKVDNALQSGN | WESNGQPENNYKTTPPVLDSDGSFFLYSKLTVDKSRWQQGNVFSCSV |
| | | G65(77)A) | SQESVTEQDSKDSTYSLSSTLTLS | MHEALHNHYTQKSLSLSPGK (SEQ ID NO: 3875) |
| | | VH]:: huIgG1zSEFL2-2 | KADYEKHKVYACEVTHQGLSSP | |
| | | (mAb-fusion) | VTKSFNRGEC (SEQ ID NO: 3584) | |
| PL- | iPS: | VK1:huGLP1(G29E): | HGEGTFTSDVSSYLEEQAAKEFIE | QVQLVESGGGVVQPGRSLRLSCAASGFTFSNYGMHWVRQAPGEGLEW |
| 54037 | 547118 | (G4:: [hu anti- | WLKNEGGGGGGAGGGGAGGGG | VAAIWFDASDKYYADAVKGRFTISRDNSKNTLYLQMNSLRAEDTAVY |
| | | <huGIPR> G29E_361174 | AGGGGEIVMTQSPATLSVSPGER | YCARDQAIFGVVPDYWGQGTLVTVSSASTKGPSVFPLAPSSKSTSGGT |
| | | VK3 (1-286) VL]:: | ATLSCRASQSVSSNLAWYQQKPG | AALGCLVKDYFPEPVTVSWNSGALTSGVHTFPAVLQSSGLYSLSSVVT |
| | | huKLC-CL + [hu anti- | QAPRLLIYGAATRATGIPARFSGS | VPSSSLGTQTYICNVNHKPSNTKVDKKVEPKSCDKTHTCPPCPAPELLG |
| | | <huGIPR> SST200067 | GSGTEFTLTISSLQSEDFAVYYCQ | GPSVFLFPPKPKDTLMISRTPEVTCVVVDVSHEDPEVKFNWYVDGVEV |
| | | VH3 (1-472) | QYNNWPLTFGGGTKVEIKRTVAA | HNAKTKPCEEQYGSTYRCVSVLTVLHQDWLNGKEYKCKVSNKALPAP |
| | | VH]:: huIgG1zSEFL2-2 | PSVFIFPPSDEQLKSGTASVVCLL | IEKTISKAKGQPREPQVYTLPPSREEMTKNQVSLTCLVKGFYPSDIAVE |
| | | (mAb) | NNFYPREAKVQWKVDNALQSGN | WESNGQPENNYKTTPPVLDSDGSFFLYSKLTVDKSRWQQGNVFSCSV |
| | | | SQESVTEQDSKDSTYSLSSTLTLS | MHEALHNHYTQKSLSLSPGK (SEQ ID NO: 3876) |
| | | | KADYEKHKVYACEVTHQGLSSP | |
| | | | VTKSFNRGEC (SEQ ID NO: 3585) | |
| PL- | iPS: | VK1:huGLP1(G29E): | HGEGTFTSDVSSYLEEQAAKEFIE | QVQLVESGGGVVQPGRSLRLSCAASGFTFSNYGMHWVRQAPGEGLEW |
| 54100 | 547125 | (G4:: [hu anti- | WLKNEGGGGGGAGGGGAGGGG | VAAIWFDASDKYYADAVKGRFTISRDNSKNTLYLQMNSLRAEDTAVY |
| | | <huGIPR> G29E_471479 | AGGGGEIVMTQSPATLSVSPGER | YCARDLAIFGVVPDYWGQGTLVTVSSASTKGPSVFPLAPSSKSTSGGTA |
| | | VK3 (1-286) VL]:: | ATLSCRASQSVDLHLAWYQQKP | ALGCLVKDYFPEPVTVSWNSGALTSGVHTFPAVLQSSGLYSLSSVVTV |
| | | huKLC-CL + [hu anti- | GQAPRLLIYEAATRATGIPARFSG | PSSSLGTQTYICNVNHKPSNTKVDKKVEPKSCDKTHTCPPCPAPELLGG |
| | | <huGIPR> G29E_ | SGSGTEFTLTISSLQSEDFAVYYC | PSVFLFPPKPKDTLMISRTPEVTCVVVDVSHEDPEVKFNWYVDGVEVH |
| | | 471439_VH3(1-472) | QQYQNWPLTFGGGTKVEIKRTVA | NAKTKPCEEQYGSTYRCVSVLTVLHQDWLNGKEYKCKVSNKALPAPI |
| | | VH]:: huIgG1zSEFL2-2 | APSVFIFPPSDEQLKSGTASVVCL | EKTISKAKGQPREPQVYTLPPSREEMTKNQVSLTCLVKGFYPSDIAVEW |
| | | (mAb) | LNNFYPREAKVQWKVDNALQSG | ESNGQPENNYKTTPPVLDSDGSFFLYSKLTVDKSRWQQGNVFSCSVMH |
| | | | NSQESVTEQDSKDSTYSLSSTLTL | EALHNHYTQKSLSLSPGK (SEQ ID NO: 3877) |
| | | | SKADYEKHKVYACEVTHQGLSSP | |
| | | | VTKSFNRGEC (SEQ ID NO: 3586) | |
| PL- | iPS: | VK1:huGLP1(G29E): | HGEGTFTSDVSSYLEEQAAKEFIE | QVQLVESGGGVVQPGRSLRLSCAASGFTFSNYGMHWVRQAPGEGLEW |
| 54101 | 547129 | (G4:: [hu anti- | WLKNEGGGGGGAGGGGAGGGG | VAAIWFDASDKYYADAVKGRFTISRDNSKNTLYLQMNSLRAEDTAVY |
| | | <huGIPR> G29E_529362 | AGGGGEIVLTQSPATLSLSPGERA | YCARDQAIFGVVPDYWGQGTLVTVSSASTKGPSVFPLAPSSKSTSGGT |
| | | VK3(1-286)VL]:: | TLSCRASQSVSSNLAWYQQKPGQ | AALGCLVKDYFPEPVTVSWNSGALTSGVHTFPAVLQSSGLYSLSSVVT |
| | | huKLC-CL + [hu anti- | APRLLIYGAATRATGIPDRFSGSG | VPSSSLGTQTYICNVNHKPSNTKVDKKVEPKSCDKTHTCPPCPAPELLG |
| | | <huGIPR> SST200067 | SGTEFTLTISRLEPEDFAVYYCQQ | GPSVFLFPPKPKDTLMISRTPEVTCVVVDVSHEDPEVKFNWYVDGVEV |
| | | VH3(1-472) | YNNWPLTFGGGTKVEIKRTVAAP | HNAKTKPCEEQYGSTYRCVSVLTVLHQDWLNGKEYKCKVSNKALPAP |
| | | VH]:: huIgG1zSEFL2-2 | SVFIFPPSDEQLKSGTASVVCLLN | IEKTISKAKGQPREPQVYTLPPSREEMTKNQVSLTCLVKGFYPSDIAVE |
| | | (mAb) | NFYPREAKVQWKVDNALQSGNS | WESNGQPENNYKTTPPVLDSDGSFFLYSKLTVDKSRWQQGNVFSCSV |
| | | | QESVTEQDSKDSTYSLSSTLTLSK | MHEALHNHYTQKSLSLSPGK (SEQ ID NO: 3878) |
| | | | ADYEKHKVYACEVTHQGLSSPVT | |
| | | | KSFNRGEC (SEQ ID NO: 3587) | |
| PL- | iPS: | VK1:huGLP1(G29E): | HGEGTFTSDVSSYLEEQAAKEFIE | QVQLVESGGGVVQPGRSLRLSCAASGFTFSNYGMHWVRQAPGEGLEW |
| 54039 | 547133 | (G4:: [hu anti- | WLKNEGGGGGGAGGGGAGGGG | VAAIWFDASDKYYADAVKGRFTISRDNSKNTLYLQMNSLRAEDTAVY |
| | | <huGIPR> G29E_ | AGGGGEIVLTQSPATLSLSPGERA | YCARDLAIFGVVPDYWGQGTLVTVSSASTKGPSVFPLAPSSKSTSGGTA |
| | | 529367 VK3(1-286) | TLSCRASQSVLSHLAWYQQKPGQ | ALGCLVKDYFPEPVTVSWNSGALTSGVHTFPAVLQSSGLYSLSSVVTV |
| | | VL]:: huKLC-CL + | APRLLIYEAATRATGIPDRFSGSG | PSSSLGTQTYICNVNHKPSNTKVDKKVEPKSCDKTHTCPPCPAPELLGG |
| | | [hu anti-<huGIPR> | SGTEFTLTISRLEPEDFAVYYCQQ | PSVFLFPPKPKDTLMISRTPEVTCVVVDVSHEDPEVKFNWYVDGVEVH |
| | | G29E_471439_VH3 (1- | YQNWPLTFGGGTKVEIKRTVAAP | NAKTKPCEEQYGSTYRCVSVLTVLHQDWLNGKEYKCKVSNKALPAPI |
| | | 472) | SVFIFPPSDEQLKSGTASVVCLLN | EKTISKAKGQPREPQVYTLPPSREEMTKNQVSLTCLVKGFYPSDIAVEW |
| | | VH]:: huIgG1zSEFL2-2 | NFYPREAKVQWKVDNALQSGNS | ESNGQPENNYKTTPPVLDSDGSFFLYSKLTVDKSRWQQGNVFSCSVMH |
| | | (mAb) | QESVTEQDSKDSTYSLSSTLTLSK | EALHNHYTQKSLSLSPGK (SEQ ID NO: 3879) |
| | | | ADYEKHKVYACEVTHQGLSSPVT | |
| | | | KSFNRGEC (SEQ ID NO: 3588) | |
| PL- | iPS: | VK1:huGLP1(G29E): | HGEGTFTSDVSSYLEEQAAKEFIE | QVQLVESGGGVVQPGRSLRLSCAASGFTFSNYGMHWVRQAPGEGLEW |
| 54040 | 547137 | (G4:: [hu anti- | WLKNEGGGGGGAGGGGAGGGG | VAAIWFDASDKYYADAVKGRFTISRDNSKNTLYLQMNSLRAEDTAVY |
| | | <huGIPR> G29E_ | AGGGGEIVLTQSPATLSLSPGERA | YCARDLAIFGVVPDYWGQGTLVTVSSASTKGPSVFPLAPSSKSTSGGTA |
| | | 529368 VK3(1-286) | TLSCRASQSVDLHLAWYQQKPG | ALGCLVKDYFPEPVTVSWNSGALTSGVHTFPAVLQSSGLYSLSSVVTV |
| | | VL]:: huKLC-CL + | QAPRLLIYEAATRATGIPDRFSGS | PSSSLGTQTYICNVNHKPSNTKVDKKVEPKSCDKTHTCPPCPAPELLGG |
| | | [hu anti-<huGIPR> | GSGTEFTLTISRLEPEDFAVYYCQ | PSVFLFPPKPKDTLMISRTPEVTCVVVDVSHEDPEVKFNWYVDGVEVH |
| | | G29E_471439_VH3 (1- | QYQNWPLTFGGGTKVEIKRTVAA | NAKTKPCEEQYGSTYRCVSVLTVLHQDWLNGKEYKCKVSNKALPAPI |
| | | 472) | PSVFIFPPSDEQLKSGTASVVCLL | EKTISKAKGQPREPQVYTLPPSREEMTKNQVSLTCLVKGFYPSDIAVEW |
| | | VH]:: huIgG1zSEFL2-2 | NNFYPREAKVQWKVDNALQSGN | ESNGQPENNYKTTPPVLDSDGSFFLYSKLTVDKSRWQQGNVFSCSVMH |
| | | (mAb) | SQESVTEQDSKDSTYSLSSTLTLS | EALHNHYTQKSLSLSPGK (SEQ ID NO: 3880) |
| | | | KADYEKHKVYACEVTHQGLSSP | |
| | | | VTKSFNRGEC (SEQ ID NO: 3589) | |
| PL- | iPS: | VK1:huGLP1(G29E, | HSEGTFTSDVSSYLEEQAAKEFIE | QVQLVESGGGVVQPGRSLRLSCAASGFTFSNYGMHWVRQAPGEGLEW |
| 54032 | 547141 | A2S):: [hu anti- | WLKNEGGGGGGAGGGGAGGGG | VAAIWFDASDKYYADAVKGRFTISRDNSKNTLYLQMNSLRAEDTAVY |
| | | <huGIPR> G29E(A2S) | AGGGGEIVMTQSPATLSVSPGER | YCARDQAIFGVVPDYWGQGTLVTVSSASTKGPSVFPLAPSSKSTSGGT |
| | | 361174 VK3(1-286) | ATLSCRASQSVSSNLAWYQQKPG | AALGCLVKDYFPEPVTVSWNSGALTSGVHTFPAVLQSSGLYSLSSVVT |
| | | VL]:: huKLC-CL + [hu | QAPRLLIYGAATRATGIPARFSGS | VPSSSLGTQTYICNVNHKPSNTKVDKKVEPKSCDKTHTCPPCPAPELLG |
| | | anti-<huGIPR> | GSGTEFTLTISSLQSEDFAVYYCQ | GPSVFLFPPKPKDTLMISRTPEVTCVVVDVSHEDPEVKFNWYVDGVEV |
| | | SST200067 VH3 (1- | QYNNWPLTFGGGTKVEIKRTVAA | HNAKTKPCEEQYGSTYRCVSVLTVLHQDWLNGKEYKCKVSNKALPAP |
| | | 472) | PSVFIFPPSDEQLKSGTASVVCLL | IEKTISKAKGQPREPQVYTLPPSREEMTKNQVSLTCLVKGFYPSDIAVE |
| | | VH]:: huIgG1zSEFL2-2 | NNFYPREAKVQWKVDNALQSGN | WESNGQPENNYKTTPPVLDSDGSFFLYSKLTVDKSRWQQGNVFSCSV |
| | | (mAb) | SQESVTEQDSKDSTYSLSSTLTLS | MHEALHNHYTQKSLSLSPGK (SEQ ID NO: 3881) |
| | | | KADYEKHKVYACEVTHQGLSSP | |
| | | | VTKSFNRGEC (SEQ ID NO: 3590) | |
| PL- | iPS: | VK1:huGLP1(G29E, | HSEGTFTSDVSSYLEEQAAKEFIE | QVQLVESGGGVVQPGRSLRLSCAASGFTFSNYGMHWVRQAPGEGLEW |
| 54034 | 547148 | A2S):: [hu anti- | WLKNEGGGGGGAGGGGAGGGG | VAAIWFDASDKYYADAVKGRFTISRDNSKNTLYLQMNSLRAEDTAVY |
| | | <huGIPR> G29E(A2S) | AGGGGEIVMTQSPATLSVSPGER | YCARDLAIFGVVPDYWGQGTLVTVSSASTKGPSVFPLAPSSKSTSGGTA |
| | | 471479 VK3 (1-286) | ATLSCRASQSVDLHLAWYQQKP | ALGCLVKDYFPEPVTVSWNSGALTSGVHTFPAVLQSSGLYSLSSVVTV |
| | | VL]:: huKLC-CL + [hu | GQAPRLLIYEAATRATGIPARFSG | PSSSLGTQTYICNVNHKPSNTKVDKKVEPKSCDKTHTCPPCPAPELLGG |
| | | anti-<huGIPR> | SGSGTEFTLTISSLQSEDFAVYYC | PSVFLFPPKPKDTLMISRTPEVTCVVVDVSHEDPEVKFNWYVDGVEVH |
| | | G29E_471439 VH3 (1- | QQYQNWPLTFGGGTKVEIKRTVA | NAKTKPCEEQYGSTYRCVSVLTVLHQDWLNGKEYKCKVSNKALPAPI |
| | | 472) | APSVFIFPPSDEQLKSGTASVVCL | EKTISKAKGQPREPQVYTLPPSREEMTKNQVSLTCLVKGFYPSDIAVEW |
| | | VH]:: huIgG1zSEFL2-2 | LNNFYPREAKVQWKVDNALQSG | ESNGQPENNYKTTPPVLDSDGSFFLYSKLTVDKSRWQQGNVFSCSVMH |
| | | (mAb) | NSQESVTEQDSKDSTYSLSSTLTL | EALHNHYTQKSLSLSPGK (SEQ ID NO: 3882) |
| | | | SKADYEKHKVYACEVTHQGLSSP | |
| | | | VTKSFNRGEC (SEQ ID NO: 3591) | |
| PL- | iPS: | VK1:huGLP1(G29E, | HSEGTFTSDVSSYLEEQAAKEFIE | QVQLVESGGGVVQPGRSLRLSCAASGFTFSNYGMHWVRQAPGEGLEW |
| 54102 | 547152 | A2S):: [hu anti- | WLKNEGGGGGGAGGGGAGGGG | VAAIWFDASDKYYADAVKGRFTISRDNSKNTLYLQMNSLRAEDTAVY |
| | | <huGIPR> G29E(A2S) | AGGGGEIVLTQSPATLSLSPGERA | YCARDQAIFGVVPDYWGQGTLVTVSSASTKGPSVFPLAPSSKSTSGGT |
| | | 529362 VK3(1-286) | TLSCRASQSVSSNLAWYQQKPGQ | AALGCLVKDYFPEPVTVSWNSGALTSGVHTFPAVLQSSGLYSLSSVVT |
| | | VL]:: huKLC-CL + [hu | APRLLIYGAATRATGIPDRFSGSG | VPSSSLGTQTYICNVNHKPSNTKVDKKVEPKSCDKTHTCPPCPAPELLG |
| | | anti-<huGIPR> | SGTEFTLTISRLEPEDFAVYYCQQ | GPSVFLFPPKPKDTLMISRTPEVTCVVVDVSHEDPEVKFNWYVDGVEV |
| | | SST200067 VH3 (1- | YNNWPLTFGGGTKVEIKRTVAAP | HNAKTKPCEEQYGSTYRCVSVLTVLHQDWLNGKEYKCKVSNKALPAP |
| | | 472) | SVFIFPPSDEQLKSGTASVVCLLN | IEKTISKAKGQPREPQVYTLPPSREEMTKNQVSLTCLVKGFYPSDIAVE |
| | | VH]:: huIgG1zSEFL2-2 | NFYPREAKVQWKVDNALQSGNS | WESNGQPENNYKTTPPVLDSDGSFFLYSKLTVDKSRWQQGNVFSCSV |
| | | (mAb) | QESVTEQDSKDSTYSLSSTLTLSK | MHEALHNHYTQKSLSLSPGK (SEQ ID NO: 3883) |
| | | | ADYEKHKVYACEVTHQGLSSPVT | |
| | | | KSFNRGEC (SEQ ID NO: 3592) | |
| PL- | iPS: | VK1:huGLP1(G29E,A2 | HSEGTFTSDVSSYLEEQAAKEFIE | QVQLVESGGGVVQPGRSLRLSCAASGFTFSNYGMHWVRQAPGEGLEW |
| 54035 | 547156 | S):: [hu anti- | WLKNEGGGGGGAGGGGAGGGG | VAAIWFDASDKYYADAVKGRFTISRDNSKNTLYLQMNSLRAEDTAVY |
| | | <huGIPR> G29E(A2S)_ | AGGGGEIVLTQSPATLSLSPGERA | YCARDLAIFGVVPDYWGQGTLVTVSSASTKGPSVFPLAPSSKSTSGGTA |
| | | 529367 VK3 (1-286) | TLSCRASQSVLSHLAWYQQKPGQ | ALGCLVKDYFPEPVTVSWNSGALTSGVHTFPAVLQSSGLYSLSSVVTV |
| | | VL]:: huKLC-CL + [hu | APRLLIYEAATRATGIPDRFSGSG | PSSSLGTQTYICNVNHKPSNTKVDKKVEPKSCDKTHTCPPCPAPELLGG |
| | | anti-<huGIPR> | SGTEFTLTISRLEPEDFAVYYCQQ | PSVFLFPPKPKDTLMISRTPEVTCVVVDVSHEDPEVKFNWYVDGVEVH |
| | | G29E_471439_VH3 (1- | YQNWPLTFGGGTKVEIKRTVAAP | NAKTKPCEEQYGSTYRCVSVLTVLHQDWLNGKEYKCKVSNKALPAPI |
| | | 472) | SVFIFPPSDEQLKSGTASVVCLLN | EKTISKAKGQPREPQVYTLPPSREEMTKNQVSLTCLVKGFYPSDIAVEW |
| | | VH]:: huIgG1zSEFL2-2 | NFYPREAKVQWKVDNALQSGNS | ESNGQPENNYKTTPPVLDSDGSFFLYSKLTVDKSRWQQGNVFSCSVMH |
| | | (mAb) | QESVTEQDSKDSTYSLSSTLTLSK | EALHNHYTQKSLSLSPGK (SEQ ID NO: 3884) |
| | | | ADYEKHKVYACEVTHQGLSSPVT | |
| | | | KSFNRGEC (SEQ ID NO: 3593) | |
| PL- | iPS: | VK1:huGLP1(G29E, | HSEGTFTSDVSSYLEEQAAKEFIE | QVQLVESGGGVVQPGRSLRLSCAASGFTFSNYGMHWVRQAPGEGLEW |
| 54036 | 547160 | A2S):: [hu anti- | WLKNEGGGGGGAGGGGAGGGG | VAAIWFDASDKYYADAVKGRFTISRDNSKNTLYLQMNSLRAEDTAVY |
| | | <huGIPR> G29E(A2S)_ | AGGGGEIVLTQSPATLSLSPGERA | YCARDLAIFGVVPDYWGQGTLVTVSSASTKGPSVFPLAPSSKSTSGGTA |
| | | 529368 VK3(1-286) | TLSCRASQSVDLHLAWYQQKPG | ALGCLVKDYFPEPVTVSWNSGALTSGVHTFPAVLQSSGLYSLSSVVTV |
| | | VL]:: huKLC-CL + [hu | QAPRLLIYEAATRATGIPDRFSGS | PSSSLGTQTYICNVNHKPSNTKVDKKVEPKSCDKTHTCPPCPAPELLGG |
| | | anti-<huGIPR> | GSGTEFTLTISRLEPEDFAVYYCQ | PSVFLFPPKPKDTLMISRTPEVTCVVVDVSHEDPEVKFNWYVDGVEVH |
| | | G29E_471439_VH3 (1- | QYQNWPLTFGGGTKVEIKRTVAA | NAKTKPCEEQYGSTYRCVSVLTVLHQDWLNGKEYKCKVSNKALPAPI |
| | | 472) | PSVFIFPPSDEQLKSGTASVVCLL | EKTISKAKGQPREPQVYTLPPSREEMTKNQVSLTCLVKGFYPSDIAVEW |
| | | VH]:: huIgG1zSEFL2-2 | NNFYPREAKVQWKVDNALQSGN | ESNGQPENNYKTTPPVLDSDGSFFLYSKLTVDKSRWQQGNVFSCSVMH |
| | | (mAb) | SQESVTEQDSKDSTYSLSSTLTLS | EALHNHYTQKSLSLSPGK (SEQ ID NO: 3885) |
| | | | KADYEKHKVYACEVTHQGLSSP | |
| | | | VTKSFNRGEC (SEQ ID NO: 3594) | |
| PL- | iPS: | VK1:huGLP1(G29P): | HGEGTFTSDVSSYLEEQAAKEFIE | QVQLVESGGGVVQPGRSLRLSCAASGFTFSNYGMHWVRQAPGEGLEW |
| 54047 | 547164 | (G4:: [hu anti- | WLKNPGGGGGGAGGGGAGGGG | VAAIWFDASDKYYADAVKGRFTISRDNSKNTLYLQMNSLRAEDTAVY |
| | | <huGIPR> G29P_361174 | AGGGGEIVMTQSPATLSVSPGER | YCARDQAIFGVVPDYWGQGTLVTVSSASTKGPSVFPLAPSSKSTSGGT |
| | | VK3 (1-286)VL]:: | ATLSCRASQSVSSNLAWYQQKPG | AALGCLVKDYFPEPVTVSWNSGALTSGVHTFPAVLQSSGLYSLSSVVT |
| | | huKLC-CL + | QAPRLLIYGAATRATGIPARFSGS | VPSSSLGTQTYICNVNHKPSNTKVDKKVEPKSCDKTHTCPPCPAPELLG |
| | | [hu anti-<huGIPR> | GSGTEFTLTISSLQSEDFAVYYCQ | GPSVFLFPPKPKDTLMISRTPEVTCVVVDVSHEDPEVKFNWYVDGVEV |
| | | SST200067 VH3 (1- | QYNNWPLTFGGGTKVEIKRTVAA | HNAKTKPCEEQYGSTYRCVSVLTVLHQDWLNGKEYKCKVSNKALPAP |
| | | 472) | PSVFIFPPSDEQLKSGTASVVCLL | IEKTISKAKGQPREPQVYTLPPSREEMTKNQVSLTCLVKGFYPSDIAVE |
| | | VH]:: huIgG1zSEFL2-2 | NNFYPREAKVQWKVDNALQSGN | WESNGQPENNYKTTPPVLDSDGSFFLYSKLTVDKSRWQQGNVFSCSV |
| | | (mAb) | SQESVTEQDSKDSTYSLSSTLTLS | MHEALHNHYTQKSLSLSPGK (SEQ ID NO: 3886) |
| | | | KADYEKHKVYACEVTHQGLSSP | |
| | | | VTKSFNRGEC (SEQ ID NO: 3595) | |
| PL- | iPS: | VK1:huGLP1(G29P): | HGEGTFTSDVSSYLEEQAAKEFIE | QVQLVESGGGVVQPGRSLRLSCAASGFTFSNYGMHWVRQAPGEGLEW |
| 54049 | 547171 | (G4:: [hu anti- | WLKNPGGGGGGAGGGGAGGGG | VAAIWFDASDKYYADAVKGRFTISRDNSKNTLYLQMNSLRAEDTAVY |
| | | <huGIPR> G29P_471479 | AGGGGEIVMTQSPATLSVSPGER | YCARDLAIFGVVPDYWGQGTLVTVSSASTKGPSVFPLAPSSKSTSGGTA |
| | | VK3(1-286)VL]:: | ATLSCRASQSVDLHLAWYQQKP | ALGCLVKDYFPEPVTVSWNSGALTSGVHTFPAVLQSSGLYSLSSVVTV |
| | | huKLC-CL + | GQAPRLLIYEAATRATGIPARFSG | PSSSLGTQTYICNVNHKPSNTKVDKKVEPKSCDKTHTCPPCPAPELLGG |
| | | [hu anti-<huGIPR> | SGSGTEFTLTISSLQSEDFAVYYC | PSVFLFPPKPKDTLMISRTPEVTCVVVDVSHEDPEVKFNWYVDGVEVH |
| | | G29E 471439_VH3(1- | QQYQNWPLTFGGGTKVEIKRTVA | NAKTKPCEEQYGSTYRCVSVLTVLHQDWLNGKEYKCKVSNKALPAPI |
| | | 472) | APSVFIFPPSDEQLKSGTASVVCL | EKTISKAKGQPREPQVYTLPPSREEMTKNQVSLTCLVKGFYPSDIAVEW |
| | | VH]:: huIgG1zSEFL2-2 | LNNFYPREAKVQWKVDNALQSG | ESNGQPENNYKTTPPVLDSDGSFFLYSKLTVDKSRWQQGNVFSCSVMH |
| | | (mAb) | NSQESVTEQDSKDSTYSLSSTLTL | EALHNHYTQKSLSLSPGK (SEQ ID NO: 3887) |
| | | | SKADYEKHKVYACEVTHQGLSSP | |
| | | | VTKSFNRGEC (SEQ ID NO: 3596) | |
| PL- | iPS: | VK1:huGLP1(G29P): | HGEGTFTSDVSSYLEEQAAKEFIE | QVQLVESGGGVVQPGRSLRLSCAASGFTFSNYGMHWVRQAPGEGLEW |
| 54050 | 547175 | (G4:: [hu anti- | WLKNPGGGGGGAGGGGAGGGG | VAAIWFDASDKYYADAVKGRFTISRDNSKNTLYLQMNSLRAEDTAVY |
| | | <huGIPR> G29P_529362 | AGGGGEIVLTQSPATLSLSPGERA | YCARDQAIFGVVPDYWGQGTLVTVSSASTKGPSVFPLAPSSKSTSGGT |
| | | VK3(1-286) VL]:: | TLSCRASQSVSSNLAWYQQKPGQ | AALGCLVKDYFPEPVTVSWNSGALTSGVHTFPAVLQSSGLYSLSSVVT |
| | | huKLC-CL + | APRLLIYGAATRATGIPDRFSGSG | VPSSSLGTQTYICNVNHKPSNTKVDKKVEPKSCDKTHTCPPCPAPELLG |
| | | [hu anti-<huGIPR> | SGTEFTLTISRLEPEDFAVYYCQQ | GPSVFLFPPKPKDTLMISRTPEVTCVVVDVSHEDPEVKFNWYVDGVEV |
| | | SST200067 VH3 (1- | YNNWPLTFGGGTKVEIKRTVAAP | HNAKTKPCEEQYGSTYRCVSVLTVLHQDWLNGKEYKCKVSNKALPAP |
| | | 472) | SVFIFPPSDEQLKSGTASVVCLLN | IEKTISKAKGQPREPQVYTLPPSREEMTKNQVSLTCLVKGFYPSDIAVE |
| | | VH]: :huIgG1zSEFL2-2 | NFYPREAKVQWKVDNALQSGNS | WESNGQPENNYKTTPPVLDSDGSFFLYSKLTVDKSRWQQGNVFSCSV |
| | | (mAb) | QESVTEQDSKDSTYSLSSTLTLSK | MHEALHNHYTQKSLSLSPGK (SEQ ID NO: 3888) |
| | | | ADYEKHKVYACEVTHQGLSSPVT | |
| | | | KSFNRGEC (SEQ ID NO: 3597) | |
| PL- | iPS: | VK1:huGLP1(G29P): | HGEGTFTSDVSSYLEEQAAKEFIE | QVQLVESGGGVVQPGRSLRLSCAASGFTFSNYGMHWVRQAPGEGLEW |
| 54051 | 547179 | (G4:: [hu anti- | WLKNPGGGGGGAGGGGAGGGG | VAAIWFDASDKYYADAVKGRFTISRDNSKNTLYLQMNSLRAEDTAVY |
| | | <huGIPR> G29P_529367 | AGGGGEIVLTQSPATLSLSPGERA | YCARDLAIFGVVPDYWGQGTLVTVSSASTKGPSVFPLAPSSKSTSGGTA |
| | | VK3(1-286)VL]:: | TLSCRASQSVLSHLAWYQQKPGQ | ALGCLVKDYFPEPVTVSWNSGALTSGVHTFPAVLQSSGLYSLSSVVTV |
| | | huKLC-CL + | APRLLIYEAATRATGIPDRFSGSG | PSSSLGTQTYICNVNHKPSNTKVDKKVEPKSCDKTHTCPPCPAPELLGG |
| | | [hu anti-<huGIPR> | SGTEFTLTISRLEPEDFAVYYCQQ | PSVFLFPPKPKDTLMISRTPEVTCVVVDVSHEDPEVKFNWYVDGVEVH |
| | | G29E_471439_VH3(1- | YQNWPLTFGGGTKVEIKRTVAAP | NAKTKPCEEQYGSTYRCVSVLTVLHQDWLNGKEYKCKVSNKALPAPI |
| | | 472) | SVFIFPPSDEQLKSGTASVVCLLN | EKTISKAKGQPREPQVYTLPPSREEMTKNQVSLTCLVKGFYPSDIAVEW |
| | | VH]:: huIgG1zSEFL2-2 | NFYPREAKVQWKVDNALQSGNS | ESNGQPENNYKTTPPVLDSDGSFFLYSKLTVDKSRWQQGNVFSCSVMH |
| | | (mAb) | QESVTEQDSKDSTYSLSSTLTLSK | EALHNHYTQKSLSLSPGK (SEQ ID NO: 3889) |
| | | | ADYEKHKVYACEVTHQGLSSPVT | |
| | | | KSFNRGEC (SEQ ID NO: 3598) | |
| PL- | iPS: | VK1:huGLP1(G29P): | HGEGTFTSDVSSYLEEQAAKEFIE | QVQLVESGGGVVQPGRSLRLSCAASGFTFSNYGMHWVRQAPGEGLEW |
| 54052 | 547183 | (G4:: [hu anti- | WLKNPGGGGGGAGGGGAGGGG | VAAIWFDASDKYYADAVKGRFTISRDNSKNTLYLQMNSLRAEDTAVY |
| | | <huGIPR> G29P_529368 | AGGGGEIVLTQSPATLSLSPGERA | YCARDLAIFGVVPDYWGQGTLVTVSSASTKGPSVFPLAPSSKSTSGGTA |
| | | VK3(1-286)VL]:: | TLSCRASQSVDLHLAWYQQKPG | ALGCLVKDYFPEPVTVSWNSGALTSGVHTFPAVLQSSGLYSLSSVVTV |
| | | huKLC-CL + | QAPRLLIYEAATRATGIPDRFSGS | PSSSLGTQTYICNVNHKPSNTKVDKKVEPKSCDKTHTCPPCPAPELLGG |
| | | [hu anti-<huGIPR> | GSGTEFTLTISRLEPEDFAVYYCQ | PSVFLFPPKPKDTLMISRTPEVTCVVVDVSHEDPEVKFNWYVDGVEVH |
| | | G29E_471439_VH3(1- | QYQNWPLTFGGGTKVEIKRTVAA | NAKTKPCEEQYGSTYRCVSVLTVLHQDWLNGKEYKCKVSNKALPAPI |
| | | 472) | PSVFIFPPSDEQLKSGTASVVCLL | EKTISKAKGQPREPQVYTLPPSREEMTKNQVSLTCLVKGFYPSDIAVEW |
| | | VH]:: huIgG1zSEFL2-2 | NNFYPREAKVQWKVDNALQSGN | ESNGQPENNYKTTPPVLDSDGSFFLYSKLTVDKSRWQQGNVFSCSVMH |
| | | (mAb) | SQESVTEQDSKDSTYSLSSTLTLS | EALHNHYTQKSLSLSPGK (SEQ ID NO: 3890) |
| | | | KADYEKHKVYACEVTHQGLSSP | |
| | | | VTKSFNRGEC (SEQ ID NO: 3599) | |
| PL- | iPS: | VK1:huGLP1(G29P, | HSEGTFTSDVSSYLEEQAAKEFIE | QVQLVESGGGVVQPGRSLRLSCAASGFTFSNYGMHWVRQAPGEGLEW |
| 54041 | 547187 | A2S):: [hu anti- | WLKNPGGGGGGAGGGGAGGGG | VAAIWFDASDKYYADAVKGRFTISRDNSKNTLYLQMNSLRAEDTAVY |
| | | <huGIPR> G29P(A2S)_ | AGGGGEIVMTQSPATLSVSPGER | YCARDQAIFGVVPDYWGQGTLVTVSSASTKGPSVFPLAPSSKSTSGGT |
| | | 361174 VK3(1-286) | ATLSCRASQSVSSNLAWYQQKPG | AALGCLVKDYFPEPVTVSWNSGALTSGVHTFPAVLQSSGLYSLSSVVT |
| | | VL]:: huKLC-CL + [hu | QAPRLLIYGAATRATGIPARFSGS | VPSSSLGTQTYICNVNHKPSNTKVDKKVEPKSCDKTHTCPPCPAPELLG |
| | | anti-<huGIPR> | GSGTEFTLTISSLQSEDFAVYYCQ | GPSVFLFPPKPKDTLMISRTPEVTCVVVDVSHEDPEVKFNWYVDGVEV |
| | | SST200067 VH3(1- | QYNNWPLTFGGGTKVEIKRTVAA | HNAKTKPCEEQYGSTYRCVSVLTVLHQDWLNGKEYKCKVSNKALPAP |
| | | 472) | PSVFIFPPSDEQLKSGTASVVCLL | IEKTISKAKGQPREPQVYTLPPSREEMTKNQVSLTCLVKGFYPSDIAVE |
| | | VH]:: huIgG1zSEFL2-2 | NNFYPREAKVQWKVDNALQSGN | WESNGQPENNYKTTPPVLDSDGSFFLYSKLTVDKSRWQQGNVFSCSV |
| | | (mAb) | SQESVTEQDSKDSTYSLSSTLTLS | MHEALHNHYTQKSLSLSPGK (SEQ ID NO: 3891) |
| | | | KADYEKHKVYACEVTHQGLSSP | |
| | | | VTKSFNRGEC (SEQ ID NO: 3600) | |
| PL- | iPS: | VK1:huGLP1(G29P, | HSEGTFTSDVSSYLEEQAAKEFIE | QVQLVESGGGVVQPGRSLRLSCAASGFTFSNYGMHWVRQAPGEGLEW |
| 54043 | 547194 | A2S):: [hu anti- | WLKNPGGGGGGAGGGGAGGGG | VAAIWFDASDKYYADAVKGRFTISRDNSKNTLYLQMNSLRAEDTAVY |
| | | <huGIPR> G29P(A2S)_ | AGGGGEIVMTQSPATLSVSPGER | YCARDLAIFGVVPDYWGQGTLVTVSSASTKGPSVFPLAPSSKSTSGGTA |
| | | 471479 VK3(1-286) | ATLSCRASQSVDLHLAWYQQKP | ALGCLVKDYFPEPVTVSWNSGALTSGVHTFPAVLQSSGLYSLSSVVTV |
| | | VL]:: huKLC-CL + [hu | GQAPRLLIYEAATRATGIPARFSG | PSSSLGTQTYICNVNHKPSNTKVDKKVEPKSCDKTHTCPPCPAPELLGG |
| | | anti-<huGIPR> | SGSGTEFTLTISSLQSEDFAVYYC | PSVFLFPPKPKDTLMISRTPEVTCVVVDVSHEDPEVKFNWYVDGVEVH |
| | | G29E_471439 VH3(1- | QQYQNWPLTFGGGTKVEIKRTVA | NAKTKPCEEQYGSTYRCVSVLTVLHQDWLNGKEYKCKVSNKALPAPI |
| | | 472) | APSVFIFPPSDEQLKSGTASVVCL | EKTISKAKGQPREPQVYTLPPSREEMTKNQVSLTCLVKGFYPSDIAVEW |
| | | VH]:: huIgG1zSEFL2-2 | LNNFYPREAKVQWKVDNALQSG | ESNGQPENNYKTTPPVLDSDGSFFLYSKLTVDKSRWQQGNVFSCSVMH |
| | | (mAb) | NSQESVTEQDSKDSTYSLSSTLTL | EALHNHYTQKSLSLSPGK (SEQ ID NO: 3892) |
| | | | SKADYEKHKVYACEVTHQGLSSP | |
| | | | VTKSFNRGEC (SEQ ID NO: 3601) | |
| PL- | iPS: | VK1:huGLP1(G29P, | MDMRVPAQLLGLLLLWLRGARC | QVQLVESGGGVVQPGRSLRLSCAASGFTFSNYGMHWVRQAPGEGLEW |
| 54044 | 547198 | A2S):: [hu anti- | HSEGTFTSDVSSYLEEQAAKEFIE | VAAIWFDASDKYYADAVKGRFTISRDNSKNTLYLQMNSLRAEDTAVY |
| | | <huGIPR> G29P(A2S)_ | WLKNPGGGGGGAGGGGAGGGG | YCARDQAIFGVVPDYWGQGTLVTVSSASTKGPSVFPLAPSSKSTSGGT |
| | | 529362 VK3(1-286) | AGGGGEIVLTQSPATLSLSPGERA | AALGCLVKDYFPEPVTVSWNSGALTSGVHTFPAVLQSSGLYSLSSVVT |
| | | VL]:: huKLC-CL + [hu | TLSCRASQSVSSNLAWYQQKPGQ | VPSSSLGTQTYICNVNHKPSNTKVDKKVEPKSCDKTHTCPPCPAPELLG |
| | | anti-<huGIPR> | APRLLIYGAATRATGIPDRFSGSG | GPSVFLFPPKPKDTLMISRTPEVTCVVVDVSHEDPEVKFNWYVDGVEV |
| | | SST200067 VH3 (1- | SGTEFTLTISRLEPEDFAVYYCQQ | HNAKTKPCEEQYGSTYRCVSVLTVLHQDWLNGKEYKCKVSNKALPAP |
| | | 472) | YNNWPLTFGGGTKVEIKRTVAAP | IEKTISKAKGQPREPQVYTLPPSREEMTKNQVSLTCLVKGFYPSDIAVE |
| | | VH]:: huIgG1zSEFL2-2 | SVFIFPPSDEQLKSGTASVVCLLN | WESNGQPENNYKTTPPVLDSDGSFFLYSKLTVDKSRWQQGNVFSCSV |
| | | (mAb) | NFYPREAKVQWKVDNALQSGNS | MHEALHNHYTQKSLSLSPGK (SEQ ID NO: 3893) |
| | | | QESVTEQDSKDSTYSLSSTLTLSK | |
| | | | ADYEKHKVYACEVTHQGLSSPVT | |
| | | | KSFNRGEC (SEQ ID NO: 3602) | |
| PL- | iPS: | VK1:huGLP1(G29P, | HSEGTFTSDVSSYLEEQAAKEFIE | QVQLVESGGGVVQPGRSLRLSCAASGFTFSNYGMHWVRQAPGEGLEW |
| 54045 | 547202 | A2S):: [hu anti- | WLKNPGGGGGGAGGGGAGGGG | VAAIWFDASDKYYADAVKGRFTISRDNSKNTLYLQMNSLRAEDTAVY |
| | | <huGIPR> G29P(A2S)_ | AGGGGEIVLTQSPATLSLSPGERA | YCARDLAIFGVVPDYWGQGTLVTVSSASTKGPSVFPLAPSSKSTSGGTA |
| | | 529367 VK3(1-286) | TLSCRASQSVLSHLAWYQQKPGQ | ALGCLVKDYFPEPVTVSWNSGALTSGVHTFPAVLQSSGLYSLSSVVTV |
| | | VL]:: huKLC-CL + [hu | APRLLIYEAATRATGIPDRFSGSG | PSSSLGTQTYICNVNHKPSNTKVDKKVEPKSCDKTHTCPPCPAPELLGG |
| | | anti-<huGIPR> | SGTEFTLTISRLEPEDFAVYYCQQ | PSVFLFPPKPKDTLMISRTPEVTCVVVDVSHEDPEVKFNWYVDGVEVH |
| | | G29E_471439_VH3 (1- | YQNWPLTFGGGTKVEIKRTVAAP | NAKTKPCEEQYGSTYRCVSVLTVLHQDWLNGKEYKCKVSNKALPAPI |
| | | 472) | SVFIFPPSDEQLKSGTASVVCLLN | EKTISKAKGQPREPQVYTLPPSREEMTKNQVSLTCLVKGFYPSDIAVEW |
| | | VH]:: huIgG1zSEFL2-2 | NFYPREAKVQWKVDNALQSGNS | ESNGQPENNYKTTPPVLDSDGSFFLYSKLTVDKSRWQQGNVFSCSVMH |
| | | (mAb) | QESVTEQDSKDSTYSLSSTLTLSK | EALHNHYTQKSLSLSPGK (SEQ ID NO: 3894) |
| | | | ADYEKHKVYACEVTHQGLSSPVT | |
| | | | KSFNRGEC (SEQ ID NO: 3603) | |
| PL- | iPS: | VK1:huGLP1(G29P, | MDMRVPAQLLGLLLLWLRGARC | QVQLVESGGGVVQPGRSLRLSCAASGFTFSNYGMHWVRQAPGEGLEW |
| 54046 | 547206 | A2S):: [hu anti- | HSEGTFTSDVSSYLEEQAAKEFIE | VAAIWFDASDKYYADAVKGRFTISRDNSKNTLYLQMNSLRAEDTAVY |
| | | <huGIPR> G29P(A2S)_ | WLKNPGGGGGGAGGGGAGGGG | YCARDLAIFGVVPDYWGQGTLVTVSSASTKGPSVFPLAPSSKSTSGGTA |
| | | 529368 VK3(1-286) | AGGGGEIVLTQSPATLSLSPGERA | ALGCLVKDYFPEPVTVSWNSGALTSGVHTFPAVLQSSGLYSLSSVVTV |
| | | VL]:: huKLC-CL + [hu | TLSCRASQSVDLHLAWYQQKPG | PSSSLGTQTYICNVNHKPSNTKVDKKVEPKSCDKTHTCPPCPAPELLGG |
| | | anti-<huGIPR> | QAPRLLIYEAATRATGIPDRFSGS | PSVFLFPPKPKDTLMISRTPEVTCVVVDVSHEDPEVKFNWYVDGVEVH |
| | | G29E 471439_VH3 (1- | GSGTEFTLTISRLEPEDFAVYYCQ | NAKTKPCEEQYGSTYRCVSVLTVLHQDWLNGKEYKCKVSNKALPAPI |
| | | 472) | QYQNWPLTFGGGTKVEIKRTVAA | EKTISKAKGQPREPQVYTLPPSREEMTKNQVSLTCLVKGFYPSDIAVEW |
| | | VH]:: huIgG1zSEFL2-2 | PSVFIFPPSDEQLKSGTASVVCLL | ESNGQPENNYKTTPPVLDSDGSFFLYSKLTVDKSRWQQGNVFSCSVMH |
| | | (mAb) | NNFYPREAKVQWKVDNALQSGN | EALHNHYTQKSLSLSPGK (SEQ ID NO: 3895) |
| | | | SQESVTEQDSKDSTYSLSSTLTLS | |
| | | | KADYEKHKVYACEVTHQGLSSP | |
| | | | VTKSFNRGEC (SEQ ID NO: 3604) | |
| PL- | iPS: | VK1:huGLP1(G29Q): | HGEGTFTSDVSSYLEEQAAKEFIE | QVQLVESGGGVVQPGRSLRLSCAASGFTFSNYGMHWVRQAPGEGLEW |
| 54059 | 547210 | (G4:: [hu anti- | WLKNQGGGGGGAGGGGAGGGG | VAAIWFDASDKYYADAVKGRFTISRDNSKNTLYLQMNSLRAEDTAVY |
| | | <huGIPR> G29Q_361174 | AGGGGEIVMTQSPATLSVSPGER | YCARDQAIFGVVPDYWGQGTLVTVSSASTKGPSVFPLAPSSKSTSGGT |
| | | VK3(1-286)VL]:: | ATLSCRASQSVSSNLAWYQQKPG | AALGCLVKDYFPEPVTVSWNSGALTSGVHTFPAVLQSSGLYSLSSVVT |
| | | huKLC-CL + | QAPRLLIYGAATRATGIPARFSGS | VPSSSLGTQTYICNVNHKPSNTKVDKKVEPKSCDKTHTCPPCPAPELLG |
| | | [hu anti-<huGIPR> | GSGTEFTLTISSLQSEDFAVYYCQ | GPSVFLFPPKPKDTLMISRTPEVTCVVVDVSHEDPEVKFNWYVDGVEV |
| | | SST200067 VH3 (1- | QYNNWPLTFGGGTKVEIKRTVAA | HNAKTKPCEEQYGSTYRCVSVLTVLHQDWLNGKEYKCKVSNKALPAP |
| | | 472) | PSVFIFPPSDEQLKSGTASVVCLL | IEKTISKAKGQPREPQVYTLPPSREEMTKNQVSLTCLVKGFYPSDIAVE |
| | | VH]:: huIgG1zSEFL2-2 | NNFYPREAKVQWKVDNALQSGN | WESNGQPENNYKTTPPVLDSDGSFFLYSKLTVDKSRWQQGNVFSCSV |
| | | (mAb) | SQESVTEQDSKDSTYSLSSTLTLS | MHEALHNHYTQKSLSLSPGK (SEQ ID NO: 3896) |
| | | | KADYEKHKVYACEVTHQGLSSP | |
| | | | VTKSFNRGEC (SEQ ID NO: 3605) | |
| PL- | iPS: | VK1:huGLP1(G29Q): | MDMRVPAQLLGLLLLWLRGARC | QVQLVESGGGVVQPGRSLRLSCAASGFTFSNYGMHWVRQAPGEGLEW |
| 54061 | 547217 | (G4:: [hu anti- | HGEGTFTSDVSSYLEEQAAKEFIE | VAAIWFDASDKYYADAVKGRFTISRDNSKNTLYLQMNSLRAEDTAVY |
| | | <huGIPR> G29Q_471479 | WLKNQGGGGGGAGGGGAGGGG | YCARDLAIFGVVPDYWGQGTLVTVSSASTKGPSVFPLAPSSKSTSGGTA |
| | | VK3(1-286)VL]:: | AGGGGEIVMTQSPATLSVSPGER | ALGCLVKDYFPEPVTVSWNSGALTSGVHTFPAVLQSSGLYSLSSVVTV |
| | | huKLC-CL + | ATLSCRASQSVDLHLAWYQQKP | PSSSLGTQTYICNVNHKPSNTKVDKKVEPKSCDKTHTCPPCPAPELLGG |
| | | [hu anti-<huGIPR> | GQAPRLLIYEAATRATGIPARFSG | PSVFLFPPKPKDTLMISRTPEVTCVVVDVSHEDPEVKFNWYVDGVEVH |
| | | G29E_471439_VH3 (1- | SGSGTEFTLTISSLQSEDFAVYYC | NAKTKPCEEQYGSTYRCVSVLTVLHQDWLNGKEYKCKVSNKALPAPI |
| | | 472) | QQYQNWPLTFGGGTKVEIKRTVA | EKTISKAKGQPREPQVYTLPPSREEMTKNQVSLTCLVKGFYPSDIAVEW |
| | | VH]:: huIgG1zSEFL2-2 | APSVFIFPPSDEQLKSGTASVVCL | ESNGQPENNYKTTPPVLDSDGSFFLYSKLTVDKSRWQQGNVFSCSVMH |
| | | (mAb) | LNNFYPREAKVQWKVDNALQSG | EALHNHYTQKSLSLSPGK (SEQ ID NO: 3897) |
| | | | NSQESVTEQDSKDSTYSLSSTLTL | |
| | | | SKADYEKHKVYACEVTHQGLSSP | |
| | | | VTKSFNRGEC (SEQ ID NO: 3606) | |
| PL- | iPS: | VK1:huGLP1(G29Q): | HGEGTFTSDVSSYLEEQAAKEFIE | QVQLVESGGGVVQPGRSLRLSCAASGFTFSNYGMHWVRQAPGEGLEW |
| 54062 | 547221 | (G4:: [hu anti- | WLKNQGGGGGGAGGGGAGGGG | VAAIWFDASDKYYADAVKGRFTISRDNSKNTLYLQMNSLRAEDTAVY |
| | | <huGIPR> G29Q_529362 | AGGGGEIVLTQSPATLSLSPGERA | YCARDQAIFGVVPDYWGQGTLVTVSSASTKGPSVFPLAPSSKSTSGGT |
| | | VK3(1-286)VL]:: | TLSCRASQSVSSNLAWYQQKPGQ | AALGCLVKDYFPEPVTVSWNSGALTSGVHTFPAVLQSSGLYSLSSVVT |
| | | huKLC-CL + | APRLLIYGAATRATGIPDRFSGSG | VPSSSLGTQTYICNVNHKPSNTKVDKKVEPKSCDKTHTCPPCPAPELLG |
| | | [hu anti-<huGIPR> | SGTEFTLTISRLEPEDFAVYYCQQ | GPSVFLFPPKPKDTLMISRTPEVTCVVVDVSHEDPEVKFNWYVDGVEV |
| | | SST200067 VH3 (1- | YNNWPLTFGGGTKVEIKRTVAAP | HNAKTKPCEEQYGSTYRCVSVLTVLHQDWLNGKEYKCKVSNKALPAP |
| | | 472) | SVFIFPPSDEQLKSGTASVVCLLN | IEKTISKAKGQPREPQVYTLPPSREEMTKNQVSLTCLVKGFYPSDIAVE |
| | | VH]:: huIgG1zSEFL2-2 | NFYPREAKVQWKVDNALQSGNS | WESNGQPENNYKTTPPVLDSDGSFFLYSKLTVDKSRWQQGNVFSCSV |
| | | (mAb) | QESVTEQDSKDSTYSLSSTLTLSK | MHEALHNHYTQKSLSLSPGK (SEQ ID NO: 3898) |
| | | | ADYEKHKVYACEVTHQGLSSPVT | |
| | | | KSFNRGEC (SEQ ID NO: 3607) | |
| PL- | iPS: | VK1:huGLP1(G29Q): | HGEGTFTSDVSSYLEEQAAKEFIE | QVQLVESGGGVVQPGRSLRLSCAASGFTFSNYGMHWVRQAPGEGLEW |
| 54063 | 547225 | (G4:: [hu anti- | WLKNQGGGGGGAGGGGAGGGG | VAAIWFDASDKYYADAVKGRFTISRDNSKNTLYLQMNSLRAEDTAVY |
| | | <huGIPR> G29Q_529367 | AGGGGEIVLTQSPATLSLSPGERA | YCARDLAIFGVVPDYWGQGTLVTVSSASTKGPSVFPLAPSSKSTSGGTA |
| | | VK3(1-286)VL]:: | TLSCRASQSVLSHLAWYQQKPGQ | ALGCLVKDYFPEPVTVSWNSGALTSGVHTFPAVLQSSGLYSLSSVVTV |
| | | huKLC-CL + | APRLLIYEAATRATGIPDRFSGSG | PSSSLGTQTYICNVNHKPSNTKVDKKVEPKSCDKTHTCPPCPAPELLGG |
| | | [hu anti-<huGIPR> | SGTEFTLTISRLEPEDFAVYYCQQ | PSVFLFPPKPKDTLMISRTPEVTCVVVDVSHEDPEVKFNWYVDGVEVH |
| | | G29E_471439 VH3(1- | YQNWPLTFGGGTKVEIKRTVAAP | NAKTKPCEEQYGSTYRCVSVLTVLHQDWLNGKEYKCKVSNKALPAPI |
| | | 472) | SVFIFPPSDEQLKSGTASVVCLLN | EKTISKAKGQPREPQVYTLPPSREEMTKNQVSLTCLVKGFYPSDIAVEW |
| | | VH]:: huIgG1zSEFL2-2 | NFYPREAKVQWKVDNALQSGNS | ESNGQPENNYKTTPPVLDSDGSFFLYSKLTVDKSRWQQGNVFSCSVMH |
| | | (mAb) | QESVTEQDSKDSTYSLSSTLTLSK | EALHNHYTQKSLSLSPGK (SEQ ID NO: 3899) |
| | | | ADYEKHKVYACEVTHQGLSSPVT | |
| | | | KSFNRGEC (SEQ ID NO: 3608) | |
| PL- | iPS: | VK1:huGLP1(G29Q): | HGEGTFTSDVSSYLEEQAAKEFIE | QVQLVESGGGVVQPGRSLRLSCAASGFTFSNYGMHWVRQAPGEGLEW |
| 54064 | 547229 | (G4:: [hu anti- | WLKNQGGGGGGAGGGGAGGGG | VAAIWFDASDKYYADAVKGRFTISRDNSKNTLYLQMNSLRAEDTAVY |
| | | <huGIPR> G29Q_529368 | AGGGGEIVLTQSPATLSLSPGERA | YCARDLAIFGVVPDYWGQGTLVTVSSASTKGPSVFPLAPSSKSTSGGTA |
| | | VK3(1-286)VL]:: | TLSCRASQSVDLHLAWYQQKPG | ALGCLVKDYFPEPVTVSWNSGALTSGVHTFPAVLQSSGLYSLSSVVTV |
| | | huKLC-CL + | QAPRLLIYEAATRATGIPDRFSGS | PSSSLGTQTYICNVNHKPSNTKVDKKVEPKSCDKTHTCPPCPAPELLGG |
| | | [hu anti-<huGIPR> | GSGTEFTLTISRLEPEDFAVYYCQ | PSVFLFPPKPKDTLMISRTPEVTCVVVDVSHEDPEVKFNWYVDGVEVH |
| | | G29E_471439_VH3 (1- | QYQNWPLTFGGGTKVEIKRTVAA | NAKTKPCEEQYGSTYRCVSVLTVLHQDWLNGKEYKCKVSNKALPAPI |
| | | 472) | PSVFIFPPSDEQLKSGTASVVCLL | EKTISKAKGQPREPQVYTLPPSREEMTKNQVSLTCLVKGFYPSDIAVEW |
| | | VH]:: huIgG1zSEFL2-2 | NNFYPREAKVQWKVDNALQSGN | ESNGQPENNYKTTPPVLDSDGSFFLYSKLTVDKSRWQQGNVFSCSVMH |
| | | (mAb) | SQESVTEQDSKDSTYSLSSTLTLS | EALHNHYTQKSLSLSPGK (SEQ ID NO: 3900) |
| | | | KADYEKHKVYACEVTHQGLSSP | |
| | | | VTKSFNRGEC (SEQ ID NO: 3609) | |
| PL- | iPS: | VK1:huGLP1(G29Q, | HSEGTFTSDVSSYLEEQAAKEFIE | QVQLVESGGGVVQPGRSLRLSCAASGFTFSNYGMHWVRQAPGEGLEW |
| 54053 | 547233 | A2S):: [hu anti- | WLKNQGGGGGGAGGGGAGGGG | VAAIWFDASDKYYADAVKGRFTISRDNSKNTLYLQMNSLRAEDTAVY |
| | | <huGIPR> G29Q(A2S)_ | AGGGGEIVMTQSPATLSVSPGER | YCARDQAIFGVVPDYWGQGTLVTVSSASTKGPSVFPLAPSSKSTSGGT |
| | | 361174 VK3(1-286) | ATLSCRASQSVSSNLAWYQQKPG | AALGCLVKDYFPEPVTVSWNSGALTSGVHTFPAVLQSSGLYSLSSVVT |
| | | VL]:: huKLC-CL + [hu | QAPRLLIYGAATRATGIPARFSGS | VPSSSLGTQTYICNVNHKPSNTKVDKKVEPKSCDKTHTCPPCPAPELLG |
| | | anti-<huGIPR> | GSGTEFTLTISSLQSEDFAVYYCQ | GPSVFLFPPKPKDTLMISRTPEVTCVVVDVSHEDPEVKFNWYVDGVEV |
| | | SST200067 VH3(1- | QYNNWPLTFGGGTKVEIKRTVAA | HNAKTKPCEEQYGSTYRCVSVLTVLHQDWLNGKEYKCKVSNKALPAP |
| | | 472) | PSVFIFPPSDEQLKSGTASVVCLL | IEKTISKAKGQPREPQVYTLPPSREEMTKNQVSLTCLVKGFYPSDIAVE |
| | | VH]:: huIgG1zSEFL2-2 | NNFYPREAKVQWKVDNALQSGN | WESNGQPENNYKTTPPVLDSDGSFFLYSKLTVDKSRWQQGNVFSCSV |
| | | (mAb) | SQESVTEQDSKDSTYSLSSTLTLS | MHEALHNHYTQKSLSLSPGK (SEQ ID NO: 3901) |
| | | | KADYEKHKVYACEVTHQGLSSP | |
| | | | VTKSFNRGEC (SEQ ID NO: 3610) | |
| PL- | iPS: | VK1:huGLP1(G29Q, | HSEGTFTSDVSSYLEEQAAKEFIE | QVQLVESGGGVVQPGRSLRLSCAASGFTFSNYGMHWVRQAPGEGLEW |
| 54055 | 547240 | A2S):: [hu anti- | WLKNQGGGGGGAGGGGAGGGG | VAAIWFDASDKYYADAVKGRFTISRDNSKNTLYLQMNSLRAEDTAVY |
| | | <huGIPR> G29Q(A2S)_ | AGGGGEIVMTQSPATLSVSPGER | YCARDLAIFGVVPDYWGQGTLVTVSSASTKGPSVFPLAPSSKSTSGGTA |
| | | 471479 VK3(1-286) | ATLSCRASQSVDLHLAWYQQKP | ALGCLVKDYFPEPVTVSWNSGALTSGVHTFPAVLQSSGLYSLSSVVTV |
| | | VL]:: huKLC-CL + [hu | GQAPRLLIYEAATRATGIPARFSG | PSSSLGTQTYICNVNHKPSNTKVDKKVEPKSCDKTHTCPPCPAPELLGG |
| | | anti-<huGIPR> | SGSGTEFTLTISSLQSEDFAVYYC | PSVFLFPPKPKDTLMISRTPEVTCVVVDVSHEDPEVKFNWYVDGVEVH |
| | | G29E_471439_VH3(1- | QQYQNWPLTFGGGTKVEIKRTVA | NAKTKPCEEQYGSTYRCVSVLTVLHQDWLNGKEYKCKVSNKALPAPI |
| | | 472) | APSVFIFPPSDEQLKSGTASVVCL | EKTISKAKGQPREPQVYTLPPSREEMTKNQVSLTCLVKGFYPSDIAVEW |
| | | VH]:: huIgG1zSEFL2-2 | LNNFYPREAKVQWKVDNALQSG | ESNGQPENNYKTTPPVLDSDGSFFLYSKLTVDKSRWQQGNVFSCSVMH |
| | | (mAb) | NSQESVTEQDSKDSTYSLSSTLTL | EALHNHYTQKSLSLSPGK (SEQ ID NO: 3902) |
| | | | SKADYEKHKVYACEVTHQGLSSP | |
| | | | VTKSFNRGEC (SEQ ID NO: 3611) | |
| PL- | iPS: | VK1:huGLP1(G29Q, | HSEGTFTSDVSSYLEEQAAKEFIE | QVQLVESGGGVVQPGRSLRLSCAASGFTFSNYGMHWVRQAPGEGLEW |
| 54056 | 547244 | A2S):: [hu anti- | WLKNQGGGGGGAGGGGAGGGG | VAAIWFDASDKYYADAVKGRFTISRDNSKNTLYLQMNSLRAEDTAVY |
| | | <huGIPR> G29Q(A2S)_ | AGGGGEIVLTQSPATLSLSPGERA | YCARDQAIFGVVPDYWGQGTLVTVSSASTKGPSVFPLAPSSKSTSGGT |
| | | 529362 VK3(1-286) | TLSCRASQSVSSNLAWYQQKPGQ | AALGCLVKDYFPEPVTVSWNSGALTSGVHTFPAVLQSSGLYSLSSVVT |
| | | VL]:: huKLC-CL + [hu | APRLLIYGAATRATGIPDRFSGSG | VPSSSLGTQTYICNVNHKPSNTKVDKKVEPKSCDKTHTCPPCPAPELLG |
| | | anti-<huGIPR> | SGTEFTLTISRLEPEDFAVYYCQQ | GPSVFLFPPKPKDTLMISRTPEVTCVVVDVSHEDPEVKFNWYVDGVEV |
| | | SST200067 VH3(1- | YNNWPLTFGGGTKVEIKRTVAAP | HNAKTKPCEEQYGSTYRCVSVLTVLHQDWLNGKEYKCKVSNKALPAP |
| | | 472) | SVFIFPPSDEQLKSGTASVVCLLN | IEKTISKAKGQPREPQVYTLPPSREEMTKNQVSLTCLVKGFYPSDIAVE |
| | | VH]:: huIgG1zSEFL2-2 | NFYPREAKVQWKVDNALQSGNS | WESNGQPENNYKTTPPVLDSDGSFFLYSKLTVDKSRWQQGNVFSCSV |
| | | (mAb) | QESVTEQDSKDSTYSLSSTLTLSK | MHEALHNHYTQKSLSLSPGK (SEQ ID NO: 3903) |
| | | | ADYEKHKVYACEVTHQGLSSPVT | |
| | | | KSFNRGEC (SEQ ID NO: 3612) | |
| PL- | iPS: | VK1:huGLP1(G29Q, | HSEGTFTSDVSSYLEEQAAKEFIE | QVQLVESGGGVVQPGRSLRLSCAASGFTFSNYGMHWVRQAPGEGLEW |
| 54057 | 547248 | A2S):: [hu anti- | WLKNQGGGGGGAGGGGAGGGG | VAAIWFDASDKYYADAVKGRFTISRDNSKNTLYLQMNSLRAEDTAVY |
| | | <huGIPR> G29Q(A2S)_ | AGGGGEIVLTQSPATLSLSPGERA | YCARDLAIFGVVPDYWGQGTLVTVSSASTKGPSVFPLAPSSKSTSGGTA |
| | | 529367 VK3(1-286) | TLSCRASQSVLSHLAWYQQKPGQ | ALGCLVKDYFPEPVTVSWNSGALTSGVHTFPAVLQSSGLYSLSSVVTV |
| | | VL]:: huKLC-CL + [hu | APRLLIYEAATRATGIPDRFSGSG | PSSSLGTQTYICNVNHKPSNTKVDKKVEPKSCDKTHTCPPCPAPELLGG |
| | | anti-<huGIPR> | SGTEFTLTISRLEPEDFAVYYCQQ | PSVFLFPPKPKDTLMISRTPEVTCVVVDVSHEDPEVKFNWYVDGVEVH |
| | | G29E_471439_VH3(1- | YQNWPLTFGGGTKVEIKRTVAAP | NAKTKPCEEQYGSTYRCVSVLTVLHQDWLNGKEYKCKVSNKALPAPI |
| | | 472) | SVFIFPPSDEQLKSGTASVVCLLN | EKTISKAKGQPREPQVYTLPPSREEMTKNQVSLTCLVKGFYPSDIAVEW |
| | | VH]:: huIgG1zSEFL2-2 | NFYPREAKVQWKVDNALQSGNS | ESNGQPENNYKTTPPVLDSDGSFFLYSKLTVDKSRWQQGNVFSCSVMH |
| | | (mAb) | QESVTEQDSKDSTYSLSSTLTLSK | EALHNHYTQKSLSLSPGK (SEQ ID NO: 3904) |
| | | | ADYEKHKVYACEVTHQGLSSPVT | |
| | | | KSFNRGEC (SEQ ID NO: 3613) | |
| PL- | iPS: | VK1:huGLP1(G29Q, | HSEGTFTSDVSSYLEEQAAKEFIE | QVQLVESGGGVVQPGRSLRLSCAASGFTFSNYGMHWVRQAPGEGLEW |
| 54058 | 547252 | A2S):: [hu anti- | WLKNQGGGGGGAGGGGAGGGG | VAAIWFDASDKYYADAVKGRFTISRDNSKNTLYLQMNSLRAEDTAVY |
| | | <huGIPR> G29Q(A2S)_ | AGGGGEIVLTQSPATLSLSPGERA | YCARDLAIFGVVPDYWGQGTLVTVSSASTKGPSVFPLAPSSKSTSGGTA |
| | | 529368 VK3(1-286) | TLSCRASQSVDLHLAWYQQKPG | ALGCLVKDYFPEPVTVSWNSGALTSGVHTFPAVLQSSGLYSLSSVVTV |
| | | VL]:: huKLC-CL + [hu | QAPRLLIYEAATRATGIPDRFSGS | PSSSLGTQTYICNVNHKPSNTKVDKKVEPKSCDKTHTCPPCPAPELLGG |
| | | anti-<huGIPR> | GSGTEFTLTISRLEPEDFAVYYCQ | PSVFLFPPKPKDTLMISRTPEVTCVVVDVSHEDPEVKFNWYVDGVEVH |
| | | G29E_471439_VH3(1- | QYQNWPLTFGGGTKVEIKRTVAA | NAKTKPCEEQYGSTYRCVSVLTVLHQDWLNGKEYKCKVSNKALPAPI |
| | | 472) | PSVFIFPPSDEQLKSGTASVVCLL | EKTISKAKGQPREPQVYTLPPSREEMTKNQVSLTCLVKGFYPSDIAVEW |
| | | VH]:: huIgG1zSEFL2-2 | NNFYPREAKVQWKVDNALQSGN | ESNGQPENNYKTTPPVLDSDGSFFLYSKLTVDKSRWQQGNVFSCSVMH |
| | | (mAb) | SQESVTEQDSKDSTYSLSSTLTLS | EALHNHYTQKSLSLSPGK (SEQ ID NO: 3905) |
| | | | KADYEKHKVYACEVTHQGLSSP | |
| | | | VTKSFNRGEC (SEQ ID NO: 3614) | |
| PL- | iPS: | VK1:huGLP1(G29T): | HGEGTFTSDVSSYLEEQAAKEFIE | QVQLVESGGGVVQPGRSLRLSCAASGFTFSNYGMHWVRQAPGEGLEW |
| 54071 | 547256 | (G4:: [hu anti- | WLKNTGGGGGGAGGGGAGGGG | VAAIWFDASDKYYADAVKGRFTISRDNSKNTLYLQMNSLRAEDTAVY |
| | | <huGIPR> G29T_ | AGGGGEIVMTQSPATLSVSPGER | YCARDQAIFGVVPDYWGQGTLVTVSSASTKGPSVFPLAPSSKSTSGGT |
| | | 361174 VK3 (1-286) | ATLSCRASQSVSSNLAWYQQKPG | AALGCLVKDYFPEPVTVSWNSGALTSGVHTFPAVLQSSGLYSLSSVVT |
| | | VL]:: huKLC-CL + | QAPRLLIYGAATRATGIPARFSGS | VPSSSLGTQTYICNVNHKPSNTKVDKKVEPKSCDKTHTCPPCPAPELLG |
| | | [hu anti-<huGIPR> | GSGTEFTLTISSLQSEDFAVYYCQ | GPSVFLFPPKPKDTLMISRTPEVTCVVVDVSHEDPEVKFNWYVDGVEV |
| | | SST200067 VH3(1- | QYNNWPLTFGGGTKVEIKRTVAA | HNAKTKPCEEQYGSTYRCVSVLTVLHQDWLNGKEYKCKVSNKALPAP |
| | | 472) | PSVFIFPPSDEQLKSGTASVVCLL | IEKTISKAKGQPREPQVYTLPPSREEMTKNQVSLTCLVKGFYPSDIAVE |
| | | VH]:: huIgG1zSEFL2-2 | NNFYPREAKVQWKVDNALQSGN | WESNGQPENNYKTTPPVLDSDGSFFLYSKLTVDKSRWQQGNVFSCSV |
| | | (mAb) | SQESVTEQDSKDSTYSLSSTLTLS | MHEALHNHYTQKSLSLSPGK (SEQ ID NO: 3906) |
| | | | KADYEKHKVYACEVTHQGLSSP | |
| | | | VTKSFNRGEC (SEQ ID NO: 3615) | |
| PL- | iPS: | VK1:huGLP1(G29T): | HGEGTFTSDVSSYLEEQAAKEFIE | QVQLVESGGGVVQPGRSLRLSCAASGFTFSNYGMHWVRQAPGEGLEW |
| 54073 | 547263 | (G4:: [hu anti- | WLKNTGGGGGGAGGGGAGGGG | VAAIWFDASDKYYADAVKGRFTISRDNSKNTLYLQMNSLRAEDTAVY |
| | | <huGIPR> G29T_471479 | AGGGGEIVMTQSPATLSVSPGER | YCARDLAIFGVVPDYWGQGTLVTVSSASTKGPSVFPLAPSSKSTSGGTA |
| | | VK3(1-286) VL]:: | ATLSCRASQSVDLHLAWYQQKP | ALGCLVKDYFPEPVTVSWNSGALTSGVHTFPAVLQSSGLYSLSSVVTV |
| | | huKLC-CL + | GQAPRLLIYEAATRATGIPARFSG | PSSSLGTQTYICNVNHKPSNTKVDKKVEPKSCDKTHTCPPCPAPELLGG |
| | | [hu anti-<huGIPR> | SGSGTEFTLTISSLQSEDFAVYYC | PSVFLFPPKPKDTLMISRTPEVTCVVVDVSHEDPEVKFNWYVDGVEVH |
| | | G29E_471439_VH3(1- | QQYQNWPLTFGGGTKVEIKRTVA | NAKTKPCEEQYGSTYRCVSVLTVLHQDWLNGKEYKCKVSNKALPAPI |
| | | 472) | APSVFIFPPSDEQLKSGTASVVCL | EKTISKAKGQPREPQVYTLPPSREEMTKNQVSLTCLVKGFYPSDIAVEW |
| | | VH]:: huIgG1zSEFL2-2 | LNNFYPREAKVQWKVDNALQSG | ESNGQPENNYKTTPPVLDSDGSFFLYSKLTVDKSRWQQGNVFSCSVMH |
| | | (mAb) | NSQESVTEQDSKDSTYSLSSTLTL | EALHNHYTQKSLSLSPGK (SEQ ID NO: 3907) |
| | | | SKADYEKHKVYACEVTHQGLSSP | |
| | | | VTKSFNRGEC (SEQ ID NO: 3616) | |
| PL- | iPS: | VK1:huGLP1(G29T): | HGEGTFTSDVSSYLEEQAAKEFIE | QVQLVESGGGVVQPGRSLRLSCAASGFTFSNYGMHWVRQAPGEGLEW |
| 54074 | 547267 | (G4:: [hu anti- | WLKNTGGGGGGAGGGGAGGGG | VAAIWFDASDKYYADAVKGRFTISRDNSKNTLYLQMNSLRAEDTAVY |
| | | <huGIPR> G29T_529362 | AGGGGEIVLTQSPATLSLSPGERA | YCARDQAIFGVVPDYWGQGTLVTVSSASTKGPSVFPLAPSSKSTSGGT |
| | | VK3(1-286) VL]:: | TLSCRASQSVSSNLAWYQQKPGQ | AALGCLVKDYFPEPVTVSWNSGALTSGVHTFPAVLQSSGLYSLSSVVT |
| | | huKLC-CL + | APRLLIYGAATRATGIPDRFSGSG | VPSSSLGTQTYICNVNHKPSNTKVDKKVEPKSCDKTHTCPPCPAPELLG |
| | | [hu anti-<huGIPR> | SGTEFTLTISRLEPEDFAVYYCQQ | GPSVFLFPPKPKDTLMISRTPEVTCVVVDVSHEDPEVKFNWYVDGVEV |
| | | SST200067 VH3 (1- | YNNWPLTFGGGTKVEIKRTVAAP | HNAKTKPCEEQYGSTYRCVSVLTVLHQDWLNGKEYKCKVSNKALPAP |
| | | 472) | SVFIFPPSDEQLKSGTASVVCLLN | IEKTISKAKGQPREPQVYTLPPSREEMTKNQVSLTCLVKGFYPSDIAVE |
| | | VH]:: huIgG1zSEFL2-2 | NFYPREAKVQWKVDNALQSGNS | WESNGQPENNYKTTPPVLDSDGSFFLYSKLTVDKSRWQQGNVFSCSV |
| | | (mAb) | QESVTEQDSKDSTYSLSSTLTLSK | MHEALHNHYTQKSLSLSPGK (SEQ ID NO: 3908) |
| | | | ADYEKHKVYACEVTHQGLSSPVT | |
| | | | KSFNRGEC (SEQ ID NO: 3617) | |
| PL- | iPS: | VK1:huGLP1(G29T): | MDMRVPAQLLGLLLLWLRGARC | QVQLVESGGGVVQPGRSLRLSCAASGFTFSNYGMHWVRQAPGEGLEW |
| 54075 | 547271 | (G4:: [hu anti- | HGEGTFTSDVSSYLEEQAAKEFIE | VAAIWFDASDKYYADAVKGRFTISRDNSKNTLYLQMNSLRAEDTAVY |
| | | <huGIPR> G29T_529367 | WLKNTGGGGGGAGGGGAGGGG | YCARDLAIFGVVPDYWGQGTLVTVSSASTKGPSVFPLAPSSKSTSGGTA |
| | | VK3(1-286) VL]:: | AGGGGEIVLTQSPATLSLSPGERA | ALGCLVKDYFPEPVTVSWNSGALTSGVHTFPAVLQSSGLYSLSSVVTV |
| | | huKLC-CL + | TLSCRASQSVLSHLAWYQQKPGQ | PSSSLGTQTYICNVNHKPSNTKVDKKVEPKSCDKTHTCPPCPAPELLGG |
| | | [hu anti-<huGIPR> | APRLLIYEAATRATGIPDRFSGSG | PSVFLFPPKPKDTLMISRTPEVTCVVVDVSHEDPEVKFNWYVDGVEVH |
| | | G29E_471439_VH3(1- | SGTEFTLTISRLEPEDFAVYYCQQ | NAKTKPCEEQYGSTYRCVSVLTVLHQDWLNGKEYKCKVSNKALPAPI |
| | | 472) | YQNWPLTFGGGTKVEIKRTVAAP | EKTISKAKGQPREPQVYTLPPSREEMTKNQVSLTCLVKGFYPSDIAVEW |
| | | VH]:: huIgG1zSEFL2-2 | SVFIFPPSDEQLKSGTASVVCLLN | ESNGQPENNYKTTPPVLDSDGSFFLYSKLTVDKSRWQQGNVFSCSVMH |
| | | (mAb) | NFYPREAKVQWKVDNALQSGNS | EALHNHYTQKSLSLSPGK (SEQ ID NO: 3909) |
| | | | QESVTEQDSKDSTYSLSSTLTLSK | |
| | | | ADYEKHKVYACEVTHQGLSSPVT | |
| | | | KSFNRGEC (SEQ ID NO: 3618) | |
| PL- | iPS: | VK1:huGLP1(G29T): | MDMRVPAQLLGLLLLWLRGARC | QVQLVESGGGVVQPGRSLRLSCAASGFTFSNYGMHWVRQAPGEGLEW |
| 54076 | 547275 | (G4:: [hu anti- | HGEGTFTSDVSSYLEEQAAKEFIE | VAAIWFDASDKYYADAVKGRFTISRDNSKNTLYLQMNSLRAEDTAVY |
| | | <huGIPR> G29T_529368 | WLKNTGGGGGGAGGGGAGGGG | YCARDLAIFGVVPDYWGQGTLVTVSSASTKGPSVFPLAPSSKSTSGGTA |
| | | VK3(1-286)VL]:: | AGGGGEIVLTQSPATLSLSPGERA | ALGCLVKDYFPEPVTVSWNSGALTSGVHTFPAVLQSSGLYSLSSVVTV |
| | | huKLC-CL + | TLSCRASQSVDLHLAWYQQKPG | PSSSLGTQTYICNVNHKPSNTKVDKKVEPKSCDKTHTCPPCPAPELLGG |
| | | [hu anti-<huGIPR> | QAPRLLIYEAATRATGIPDRFSGS | PSVFLFPPKPKDTLMISRTPEVTCVVVDVSHEDPEVKFNWYVDGVEVH |
| | | G29E_471439_VH3(1- | GSGTEFTLTISRLEPEDFAVYYCQ | NAKTKPCEEQYGSTYRCVSVLTVLHQDWLNGKEYKCKVSNKALPAPI |
| | | 472) | QYQNWPLTFGGGTKVEIKRTVAA | EKTISKAKGQPREPQVYTLPPSREEMTKNQVSLTCLVKGFYPSDIAVEW |
| | | VH]:: huIgG1zSEFL2-2 | PSVFIFPPSDEQLKSGTASVVCLL | ESNGQPENNYKTTPPVLDSDGSFFLYSKLTVDKSRWQQGNVFSCSVMH |
| | | (mAb) | NNFYPREAKVQWKVDNALQSGN | EALHNHYTQKSLSLSPGK (SEQ ID NO: 3910) |
| | | | SQESVTEQDSKDSTYSLSSTLTLS | |
| | | | KADYEKHKVYACEVTHQGLSSP | |
| | | | VTKSFNRGEC (SEQ ID NO: 3619) | |
| PL- | iPS: | VK1:huGLP1(G29T, | MDMRVPAQLLGLLLLWLRGARC | QVQLVESGGGVVQPGRSLRLSCAASGFTFSNYGMHWVRQAPGEGLEW |
| 54065 | 547279 | A2S):: [hu anti- | HSEGTFTSDVSSYLEEQAAKEFIE | VAAIWFDASDKYYADAVKGRFTISRDNSKNTLYLQMNSLRAEDTAVY |
| | | <huGIPR> G29T(A2S)_ | WLKNTGGGGGGAGGGGAGGGG | YCARDQAIFGVVPDYWGQGTLVTVSSASTKGPSVFPLAPSSKSTSGGT |
| | | 361174 VK3(1-286) | AGGGGEIVMTQSPATLSVSPGER | AALGCLVKDYFPEPVTVSWNSGALTSGVHTFPAVLQSSGLYSLSSVVT |
| | | VL]:: huKLC-CL + [hu | ATLSCRASQSVSSNLAWYQQKPG | VPSSSLGTQTYICNVNHKPSNTKVDKKVEPKSCDKTHTCPPCPAPELLG |
| | | anti-<huGIPR> | QAPRLLIYGAATRATGIPARFSGS | GPSVFLFPPKPKDTLMISRTPEVTCVVVDVSHEDPEVKFNWYVDGVEV |
| | | SST200067 VH3 (1- | GSGTEFTLTISSLQSEDFAVYYCQ | HNAKTKPCEEQYGSTYRCVSVLTVLHQDWLNGKEYKCKVSNKALPAP |
| | | 472) | QYNNWPLTFGGGTKVEIKRTVAA | IEKTISKAKGQPREPQVYTLPPSREEMTKNQVSLTCLVKGFYPSDIAVE |
| | | VH]:: huIgG1zSEFL2-2 | PSVFIFPPSDEQLKSGTASVVCLL | WESNGQPENNYKTTPPVLDSDGSFFLYSKLTVDKSRWQQGNVFSCSV |
| | | (mAb) | NNFYPREAKVQWKVDNALQSGN | MHEALHNHYTQKSLSLSPGK (SEQ ID NO: 3911) |
| | | | SQESVTEQDSKDSTYSLSSTLTLS | |
| | | | KADYEKHKVYACEVTHQGLSSP | |
| | | | VTKSFNRGEC (SEQ ID NO: 3620) | |
| PL- | iPS: | VK1:huGLP1(G29T, | HSEGTFTSDVSSYLEEQAAKEFIE | QVQLVESGGGVVQPGRSLRLSCAASGFTFSNYGMHWVRQAPGEGLEW |
| 54067 | 547286 | A2S):: [hu anti- | WLKNTGGGGGGAGGGGAGGGG | VAAIWFDASDKYYADAVKGRFTISRDNSKNTLYLQMNSLRAEDTAVY |
| | | <huGIPR> G29T(A2S)_ | AGGGGEIVMTQSPATLSVSPGER | YCARDLAIFGVVPDYWGQGTLVTVSSASTKGPSVFPLAPSSKSTSGGTA |
| | | 471479 VK3(1-286) | ATLSCRASQSVDLHLAWYQQKP | ALGCLVKDYFPEPVTVSWNSGALTSGVHTFPAVLQSSGLYSLSSVVTV |
| | | VL]:: huKLC-CL + [hu | GQAPRLLIYEAATRATGIPARFSG | PSSSLGTQTYICNVNHKPSNTKVDKKVEPKSCDKTHTCPPCPAPELLGG |
| | | anti-<huGIPR> | SGSGTEFTLTISSLQSEDFAVYYC | PSVFLFPPKPKDTLMISRTPEVTCVVVDVSHEDPEVKFNWYVDGVEVH |
| | | G29E_471439_VH3(1- | QQYQNWPLTFGGGTKVEIKRTVA | NAKTKPCEEQYGSTYRCVSVLTVLHQDWLNGKEYKCKVSNKALPAPI |
| | | 472) | APSVFIFPPSDEQLKSGTASVVCL | EKTISKAKGQPREPQVYTLPPSREEMTKNQVSLTCLVKGFYPSDIAVEW |
| | | VH]:: huIgG1zSEFL2-2 | LNNFYPREAKVQWKVDNALQSG | ESNGQPENNYKTTPPVLDSDGSFFLYSKLTVDKSRWQQGNVFSCSVMH |
| | | (mAb) | NSQESVTEQDSKDSTYSLSSTLTL | EALHNHYTQKSLSLSPGK (SEQ ID NO: 3912) |
| | | | SKADYEKHKVYACEVTHQGLSSP | |
| | | | VTKSFNRGEC (SEQ ID NO: 3621) | |
| PL- | iPS: | VK1:huGLP1(G29T, | HSEGTFTSDVSSYLEEQAAKEFIE | QVQLVESGGGVVQPGRSLRLSCAASGFTFSNYGMHWVRQAPGEGLEW |
| 54068 | 547290 | A2S):: [hu anti- | WLKNTGGGGGGAGGGGAGGGG | VAAIWFDASDKYYADAVKGRFTISRDNSKNTLYLQMNSLRAEDTAVY |
| | | <huGIPR>G29T(A2S)_ | AGGGGEIVLTQSPATLSLSPGERA | YCARDQAIFGVVPDYWGQGTLVTVSSASTKGPSVFPLAPSSKSTSGGT |
| | | 529362 VK3(1-286) | TLSCRASQSVSSNLAWYQQKPGQ | AALGCLVKDYFPEPVTVSWNSGALTSGVHTFPAVLQSSGLYSLSSVVT |
| | | VL]:: huKLC-CL + [hu | APRLLIYGAATRATGIPDRFSGSG | VPSSSLGTQTYICNVNHKPSNTKVDKKVEPKSCDKTHTCPPCPAPELLG |
| | | anti-<huGIPR> | SGTEFTLTISRLEPEDFAVYYCQQ | GPSVFLFPPKPKDTLMISRTPEVTCVVVDVSHEDPEVKFNWYVDGVEV |
| | | SST200067 VH3(1- | YNNWPLTFGGGTKVEIKRTVAAP | HNAKTKPCEEQYGSTYRCVSVLTVLHQDWLNGKEYKCKVSNKALPAP |
| | | 472) | SVFIFPPSDEQLKSGTASVVCLLN | IEKTISKAKGQPREPQVYTLPPSREEMTKNQVSLTCLVKGFYPSDIAVE |
| | | VH]:: huIgG1zSEFL2-2 | NFYPREAKVQWKVDNALQSGNS | WESNGQPENNYKTTPPVLDSDGSFFLYSKLTVDKSRWQQGNVFSCSV |
| | | (mAb) | QESVTEQDSKDSTYSLSSTLTLSK | MHEALHNHYTQKSLSLSPGK (SEQ ID NO: 3913) |
| | | | ADYEKHKVYACEVTHQGLSSPVT | |
| | | | KSFNRGEC (SEQ ID NO: 3622) | |
| PL- | iPS: | VK1:huGLP1(G29T, | HSEGTFTSDVSSYLEEQAAKEFIE | QVQLVESGGGVVQPGRSLRLSCAASGFTFSNYGMHWVRQAPGEGLEW |
| 54069 | 547294 | A2S):: [hu anti- | WLKNTGGGGGGAGGGGAGGGG | VAAIWFDASDKYYADAVKGRFTISRDNSKNTLYLQMNSLRAEDTAVY |
| | | <huGIPR> G29T(A2S)_ | AGGGGEIVLTQSPATLSLSPGERA | YCARDLAIFGVVPDYWGQGTLVTVSSASTKGPSVFPLAPSSKSTSGGTA |
| | | 529367 VK3(1-286) | TLSCRASQSVLSHLAWYQQKPGQ | ALGCLVKDYFPEPVTVSWNSGALTSGVHTFPAVLQSSGLYSLSSVVTV |
| | | VL]:: huKLC-CL + [hu | APRLLIYEAATRATGIPDRFSGSG | PSSSLGTQTYICNVNHKPSNTKVDKKVEPKSCDKTHTCPPCPAPELLGG |
| | | anti-<huGIPR> | SGTEFTLTISRLEPEDFAVYYCQQ | PSVFLFPPKPKDTLMISRTPEVTCVVVDVSHEDPEVKFNWYVDGVEVH |
| | | G29E_471439_VH3(1- | YQNWPLTFGGGTKVEIKRTVAAP | NAKTKPCEEQYGSTYRCVSVLTVLHQDWLNGKEYKCKVSNKALPAPI |
| | | 472) | SVFIFPPSDEQLKSGTASVVCLLN | EKTISKAKGQPREPQVYTLPPSREEMTKNQVSLTCLVKGFYPSDIAVEW |
| | | VH]:: huIgG1zSEFL2-2 | NFYPREAKVQWKVDNALQSGNS | ESNGQPENNYKTTPPVLDSDGSFFLYSKLTVDKSRWQQGNVFSCSVMH |
| | | (mAb) | QESVTEQDSKDSTYSLSSTLTLSK | EALHNHYTQKSLSLSPGK (SEQ ID NO: 3914) |
| | | | ADYEKHKVYACEVTHQGLSSPVT | |
| | | | KSFNRGEC (SEQ ID NO: 3623) | |
| PL- | iPS: | VK1:huGLP1(G29T, | HSEGTFTSDVSSYLEEQAAKEFIE | QVQLVESGGGVVQPGRSLRLSCAASGFTFSNYGMHWVRQAPGEGLEW |
| 54070 | 547298 | A2S):: [hu anti- | WLKNTGGGGGGAGGGGAGGGG | VAAIWFDASDKYYADAVKGRFTISRDNSKNTLYLQMNSLRAEDTAVY |
| | | <huGIPR> G29T(A2S)_ | AGGGGEIVLTQSPATLSLSPGERA | YCARDLAIFGVVPDYWGQGTLVTVSSASTKGPSVFPLAPSSKSTSGGTA |
| | | 529368 VK3(1-286) | TLSCRASQSVDLHLAWYQQKPG | ALGCLVKDYFPEPVTVSWNSGALTSGVHTFPAVLQSSGLYSLSSVVTV |
| | | VL]:: huKLC-CL + [hu | QAPRLLIYEAATRATGIPDRFSGS | PSSSLGTQTYICNVNHKPSNTKVDKKVEPKSCDKTHTCPPCPAPELLGG |
| | | anti-<huGIPR> | GSGTEFTLTISRLEPEDFAVYYCQ | PSVFLFPPKPKDTLMISRTPEVTCVVVDVSHEDPEVKFNWYVDGVEVH |
| | | G29E_471439_VH3(1- | QYQNWPLTFGGGTKVEIKRTVAA | NAKTKPCEEQYGSTYRCVSVLTVLHQDWLNGKEYKCKVSNKALPAPI |
| | | 472) | PSVFIFPPSDEQLKSGTASVVCLL | EKTISKAKGQPREPQVYTLPPSREEMTKNQVSLTCLVKGFYPSDIAVEW |
| | | VH]:: huIgG1zSEFL2-2 | NNFYPREAKVQWKVDNALQSGN | ESNGQPENNYKTTPPVLDSDGSFFLYSKLTVDKSRWQQGNVFSCSVMH |
| | | (mAb) | SQESVTEQDSKDSTYSLSSTLTLS | EALHNHYTQKSLSLSPGK (SEQ ID NO: 3915) |
| | | | KADYEKHKVYACEVTHQGLSSP | |
| | | | VTKSFNRGEC (SEQ ID NO: 3624) | |
| PL- | iPS: | VK1:huGLP1(G29V): | HGEGTFTSDVSSYLEEQAAKEFIE | QVQLVESGGGVVQPGRSLRLSCAASGFTFSNYGMHWVRQAPGEGLEW |
| 54083 | 547302 | (G4:: [hu anti- | WLKNVGGGGGGAGGGGAGGGG | VAAIWFDASDKYYADAVKGRFTISRDNSKNTLYLQMNSLRAEDTAVY |
| | | <huGIPR> G29V_361174 | AGGGGEIVMTQSPATLSVSPGER | YCARDQAIFGVVPDYWGQGTLVTVSSASTKGPSVFPLAPSSKSTSGGT |
| | | VK3(1-286) VL]:: | ATLSCRASQSVSSNLAWYQQKPG | AALGCLVKDYFPEPVTVSWNSGALTSGVHTFPAVLQSSGLYSLSSVVT |
| | | huKLC-CL + | QAPRLLIYGAATRATGIPARFSGS | VPSSSLGTQTYICNVNHKPSNTKVDKKVEPKSCDKTHTCPPCPAPELLG |
| | | [hu anti-<huGIPR> | GSGTEFTLTISSLQSEDFAVYYCQ | GPSVFLFPPKPKDTLMISRTPEVTCVVVDVSHEDPEVKFNWYVDGVEV |
| | | SST200067 VH3(1- | QYNNWPLTFGGGTKVEIKRTVAA | HNAKTKPCEEQYGSTYRCVSVLTVLHQDWLNGKEYKCKVSNKALPAP |
| | | 472) | PSVFIFPPSDEQLKSGTASVVCLL | IEKTISKAKGQPREPQVYTLPPSREEMTKNQVSLTCLVKGFYPSDIAVE |
| | | VH]:: huIgG1zSEFL2-2 | NNFYPREAKVQWKVDNALQSGN | WESNGQPENNYKTTPPVLDSDGSFFLYSKLTVDKSRWQQGNVFSCSV |
| | | (mAb) | SQESVTEQDSKDSTYSLSSTLTLS | MHEALHNHYTQKSLSLSPGK (SEQ ID NO: 3916) |
| | | | KADYEKHKVYACEVTHQGLSSP | |
| | | | VTKSFNRGEC (SEQ ID NO: 3625) | |
| PL- | iPS: | VK1:huGLP1(G29V): | HGEGTFTSDVSSYLEEQAAKEFIE | QVQLVESGGGVVQPGRSLRLSCAASGFTFSNYGMHWVRQAPGEGLEW |
| 54085 | 547309 | (G4:: [hu anti- | WLKNVGGGGGGAGGGGAGGGG | VAAIWFDASDKYYADAVKGRFTISRDNSKNTLYLQMNSLRAEDTAVY |
| | | <huGIPR> G29V_471479 | AGGGGEIVMTQSPATLSVSPGER | YCARDLAIFGVVPDYWGQGTLVTVSSASTKGPSVFPLAPSSKSTSGGTA |
| | | VK3(1-286) VL]:: | ATLSCRASQSVDLHLAWYQQKP | ALGCLVKDYFPEPVTVSWNSGALTSGVHTFPAVLQSSGLYSLSSVVTV |
| | | huKLC-CL + | GQAPRLLIYEAATRATGIPARFSG | PSSSLGTQTYICNVNHKPSNTKVDKKVEPKSCDKTHTCPPCPAPELLGG |
| | | [hu anti-<huGIPR> | SGSGTEFTLTISSLQSEDFAVYYC | PSVFLFPPKPKDTLMISRTPEVTCVVVDVSHEDPEVKFNWYVDGVEVH |
| | | G29E_471439_VH3(1- | QQYQNWPLTFGGGTKVEIKRTVA | NAKTKPCEEQYGSTYRCVSVLTVLHQDWLNGKEYKCKVSNKALPAPI |
| | | 472) | APSVFIFPPSDEQLKSGTASVVCL | EKTISKAKGQPREPQVYTLPPSREEMTKNQVSLTCLVKGFYPSDIAVEW |
| | | VH]:: huIgG1zSEFL2-2 | LNNFYPREAKVQWKVDNALQSG | ESNGQPENNYKTTPPVLDSDGSFFLYSKLTVDKSRWQQGNVFSCSVMH |
| | | (mAb) | NSQESVTEQDSKDSTYSLSSTLTL | EALHNHYTQKSLSLSPGK (SEQ ID NO: 3917) |
| | | | SKADYEKHKVYACEVTHQGLSSP | |
| | | | VTKSFNRGEC (SEQ ID NO: 3626) | |
| PL- | iPS: | VK1:huGLP1(G29V): | HGEGTFTSDVSSYLEEQAAKEFIE | QVQLVESGGGVVQPGRSLRLSCAASGFTFSNYGMHWVRQAPGEGLEW |
| 54086 | 547313 | (G4:: [hu anti- | WLKNVGGGGGGAGGGGAGGGG | VAAIWFDASDKYYADAVKGRFTISRDNSKNTLYLQMNSLRAEDTAVY |
| | | <huGIPR> G29V_529362 | AGGGGEIVLTQSPATLSLSPGERA | YCARDQAIFGVVPDYWGQGTLVTVSSASTKGPSVFPLAPSSKSTSGGT |
| | | VK3(1-286) VL]:: | TLSCRASQSVSSNLAWYQQKPGQ | AALGCLVKDYFPEPVTVSWNSGALTSGVHTFPAVLQSSGLYSLSSVVT |
| | | huKLC-CL + | APRLLIYGAATRATGIPDRFSGSG | VPSSSLGTQTYICNVNHKPSNTKVDKKVEPKSCDKTHTCPPCPAPELLG |
| | | [hu anti-<huGIPR> | SGTEFTLTISRLEPEDFAVYYCQQ | GPSVFLFPPKPKDTLMISRTPEVTCVVVDVSHEDPEVKFNWYVDGVEV |
| | | SST200067 VH3(1- | YNNWPLTFGGGTKVEIKRTVAAP | HNAKTKPCEEQYGSTYRCVSVLTVLHQDWLNGKEYKCKVSNKALPAP |
| | | 472) | SVFIFPPSDEQLKSGTASVVCLLN | IEKTISKAKGQPREPQVYTLPPSREEMTKNQVSLTCLVKGFYPSDIAVE |
| | | VH]:: huIgG1zSEFL2-2 | NFYPREAKVQWKVDNALQSGNS | WESNGQPENNYKTTPPVLDSDGSFFLYSKLTVDKSRWQQGNVFSCSV |
| | | (mAb) | QESVTEQDSKDSTYSLSSTLTLSK | MHEALHNHYTQKSLSLSPGK (SEQ ID NO: 3918) |
| | | | ADYEKHKVYACEVTHQGLSSPVT | |
| | | | KSFNRGEC (SEQ ID NO: 3627) | |
| PL- | iPS: | VK1:huGLP1(G29V): | HGEGTFTSDVSSYLEEQAAKEFIE | QVQLVESGGGVVQPGRSLRLSCAASGFTFSNYGMHWVRQAPGEGLEW |
| 54087 | 547317 | (G4:: [hu anti- | WLKNVGGGGGGAGGGGAGGGG | VAAIWFDASDKYYADAVKGRFTISRDNSKNTLYLQMNSLRAEDTAVY |
| | | <huGIPR> | AGGGGEIVLTQSPATLSLSPGERA | YCARDLAIFGVVPDYWGQGTLVTVSSASTKGPSVFPLAPSSKSTSGGTA |
| | | G29V_529367 VK3(1- | TLSCRASQSVLSHLAWYQQKPGQ | ALGCLVKDYFPEPVTVSWNSGALTSGVHTFPAVLQSSGLYSLSSVVTV |
| | | 286)VL]:: huKLC-CL + | APRLLIYEAATRATGIPDRFSGSG | PSSSLGTQTYICNVNHKPSNTKVDKKVEPKSCDKTHTCPPCPAPELLGG |
| | | [hu anti-<huGIPR> | SGTEFTLTISRLEPEDFAVYYCQQ | PSVFLFPPKPKDTLMISRTPEVTCVVVDVSHEDPEVKFNWYVDGVEVH |
| | | G29E_471439_VH3(1- | YQNWPLTFGGGTKVEIKRTVAAP | NAKTKPCEEQYGSTYRCVSVLTVLHQDWLNGKEYKCKVSNKALPAPI |
| | | 472) | SVFIFPPSDEQLKSGTASVVCLLN | EKTISKAKGQPREPQVYTLPPSREEMTKNQVSLTCLVKGFYPSDIAVEW |
| | | VH]:: huIgG1zSEFL2-2 | NFYPREAKVQWKVDNALQSGNS | ESNGQPENNYKTTPPVLDSDGSFFLYSKLTVDKSRWQQGNVFSCSVMH |
| | | (mAb) | QESVTEQDSKDSTYSLSSTLTLSK | EALHNHYTQKSLSLSPGK (SEQ ID NO: 3919) |
| | | | ADYEKHKVYACEVTHQGLSSPVT | |
| | | | KSFNRGEC (SEQ ID NO: 3628) | |
| PL- | iPS: | VK1:huGLP1(G29V): | HGEGTFTSDVSSYLEEQAAKEFIE | QVQLVESGGGVVQPGRSLRLSCAASGFTFSNYGMHWVRQAPGEGLEW |
| 54088 | 547321 | (G4:: [hu anti- | WLKNVGGGGGGAGGGGAGGGG | VAAIWFDASDKYYADAVKGRFTISRDNSKNTLYLQMNSLRAEDTAVY |
| | | <huGIPR> | AGGGGEIVLTQSPATLSLSPGERA | YCARDLAIFGVVPDYWGQGTLVTVSSASTKGPSVFPLAPSSKSTSGGTA |
| | | G29V_529368 VK3(1- | TLSCRASQSVDLHLAWYQQKPG | ALGCLVKDYFPEPVTVSWNSGALTSGVHTFPAVLQSSGLYSLSSVVTV |
| | | 286)VL]:: huKLC-CL + | QAPRLLIYEAATRATGIPDRFSGS | PSSSLGTQTYICNVNHKPSNTKVDKKVEPKSCDKTHTCPPCPAPELLGG |
| | | [hu anti-<huGIPR> | GSGTEFTLTISRLEPEDFAVYYCQ | PSVFLFPPKPKDTLMISRTPEVTCVVVDVSHEDPEVKFNWYVDGVEVH |
| | | G29E_471439_VH3(1- | QYQNWPLTFGGGTKVEIKRTVAA | NAKTKPCEEQYGSTYRCVSVLTVLHQDWLNGKEYKCKVSNKALPAPI |
| | | 472) | PSVFIFPPSDEQLKSGTASVVCLL | EKTISKAKGQPREPQVYTLPPSREEMTKNQVSLTCLVKGFYPSDIAVEW |
| | | VH]:: huIgG1zSEFL2-2 | NNFYPREAKVQWKVDNALQSGN | ESNGQPENNYKTTPPVLDSDGSFFLYSKLTVDKSRWQQGNVFSCSVMH |
| | | (mAb) | SQESVTEQDSKDSTYSLSSTLTLS | EALHNHYTQKSLSLSPGK (SEQ ID NO: 3920) |
| | | | KADYEKHKVYACEVTHQGLSSP | |
| | | | VTKSFNRGEC (SEQ ID NO: 3629) | |
| PL- | iPS: | VK1:huGLP1(G29V, | HSEGTFTSDVSSYLEEQAAKEFIE | QVQLVESGGGVVQPGRSLRLSCAASGFTFSNYGMHWVRQAPGEGLEW |
| 54077 | 547325 | A2S):: [hu anti- | WLKNVGGGGGGAGGGGAGGGG | VAAIWFDASDKYYADAVKGRFTISRDNSKNTLYLQMNSLRAEDTAVY |
| | | <huGIPR> | AGGGGEIVMTQSPATLSVSPGER | YCARDQAIFGVVPDYWGQGTLVTVSSASTKGPSVFPLAPSSKSTSGGT |
| | | G29V(A2S)_361174 | ATLSCRASQSVSSNLAWYQQKPG | AALGCLVKDYFPEPVTVSWNSGALTSGVHTFPAVLQSSGLYSLSSVVT |
| | | VK3(1-286) | QAPRLLIYGAATRATGIPARFSGS | VPSSSLGTQTYICNVNHKPSNTKVDKKVEPKSCDKTHTCPPCPAPELLG |
| | | VL]:: huKLC-CL + [hu | GSGTEFTLTISSLQSEDFAVYYCQ | GPSVFLFPPKPKDTLMISRTPEVTCVVVDVSHEDPEVKFNWYVDGVEV |
| | | anti-<huGIPR> | QYNNWPLTFGGGTKVEIKRTVAA | HNAKTKPCEEQYGSTYRCVSVLTVLHQDWLNGKEYKCKVSNKALPAP |
| | | SST200067 VH3(1- | PSVFIFPPSDEQLKSGTASVVCLL | IEKTISKAKGQPREPQVYTLPPSREEMTKNQVSLTCLVKGFYPSDIAVE |
| | | 472) | NNFYPREAKVQWKVDNALQSGN | WESNGQPENNYKTTPPVLDSDGSFFLYSKLTVDKSRWQQGNVFSCSV |
| | | VH]:: huIgG1zSEFL2-2 | SQESVTEQDSKDSTYSLSSTLTLS | MHEALHNHYTQKSLSLSPGK (SEQ ID NO: 3921) |
| | | (mAb) | KADYEKHKVYACEVTHQGLSSP | |
| | | | VTKSFNRGEC (SEQ ID NO: 3630) | |
| PL- | iPS: | VK1:huGLP1(G29V, | HSEGTFTSDVSSYLEEQAAKEFIE | QVQLVESGGGVVQPGRSLRLSCAASGFTFSNYGMHWVRQAPGEGLEW |
| 54079 | 547332 | A2S):: [hu anti- | WLKNVGGGGGGAGGGGAGGGG | VAAIWFDASDKYYADAVKGRFTISRDNSKNTLYLQMNSLRAEDTAVY |
| | | <huGIPR> | AGGGGEIVMTQSPATLSVSPGER | YCARDLAIFGVVPDYWGQGTLVTVSSASTKGPSVFPLAPSSKSTSGGTA |
| | | G29V(A2S)_471479 | ATLSCRASQSVDLHLAWYQQKP | ALGCLVKDYFPEPVTVSWNSGALTSGVHTFPAVLQSSGLYSLSSVVTV |
| | | VK3(1-286) | GQAPRLLIYEAATRATGIPARFSG | PSSSLGTQTYICNVNHKPSNTKVDKKVEPKSCDKTHTCPPCPAPELLGG |
| | | VL]:: huKLC-CL + [hu | SGSGTEFTLTISSLQSEDFAVYYC | PSVFLFPPKPKDTLMISRTPEVTCVVVDVSHEDPEVKFNWYVDGVEVH |
| | | anti-<huGIPR> | QQYQNWPLTFGGGTKVEIKRTVA | NAKTKPCEEQYGSTYRCVSVLTVLHQDWLNGKEYKCKVSNKALPAPI |
| | | G29E_471439_VH3(1- | APSVFIFPPSDEQLKSGTASVVCL | EKTISKAKGQPREPQVYTLPPSREEMTKNQVSLTCLVKGFYPSDIAVEW |
| | | 472) | LNNFYPREAKVQWKVDNALQSG | ESNGQPENNYKTTPPVLDSDGSFFLYSKLTVDKSRWQQGNVFSCSVMH |
| | | VH]:: huIgG1zSEFL2-2 | NSQESVTEQDSKDSTYSLSSTLTL | EALHNHYTQKSLSLSPGK (SEQ ID NO: 3922) |
| | | (mAb) | SKADYEKHKVYACEVTHQGLSSP | |
| | | | VTKSFNRGEC (SEQ ID NO: 3631) | |
| PL- | iPS: | VK1:huGLP1(G29V, | HSEGTFTSDVSSYLEEQAAKEFIE | QVQLVESGGGVVQPGRSLRLSCAASGFTFSNYGMHWVRQAPGEGLEW |
| 54080 | 547336 | A2S):: [hu anti- | WLKNVGGGGGGAGGGGAGGGG | VAAIWFDASDKYYADAVKGRFTISRDNSKNTLYLQMNSLRAEDTAVY |
| | | <huGIPR> | AGGGGEIVLTQSPATLSLSPGERA | YCARDQAIFGVVPDYWGQGTLVTVSSASTKGPSVFPLAPSSKSTSGGT |
| | | G29V(A2S)_529362 | TLSCRASQSVSSNLAWYQQKPGQ | AALGCLVKDYFPEPVTVSWNSGALTSGVHTFPAVLQSSGLYSLSSVVT |
| | | VK3(1-286) | APRLLIYGAATRATGIPDRFSGSG | VPSSSLGTQTYICNVNHKPSNTKVDKKVEPKSCDKTHTCPPCPAPELLG |
| | | VL]:: huKLC-CL + [hu | SGTEFTLTISRLEPEDFAVYYCQQ | GPSVFLFPPKPKDTLMISRTPEVTCVVVDVSHEDPEVKFNWYVDGVEV |
| | | anti-<huGIPR> | YNNWPLTFGGGTKVEIKRTVAAP | HNAKTKPCEEQYGSTYRCVSVLTVLHQDWLNGKEYKCKVSNKALPAP |
| | | SST200067 VH3(1- | SVFIFPPSDEQLKSGTASVVCLLN | IEKTISKAKGQPREPQVYTLPPSREEMTKNQVSLTCLVKGFYPSDIAVE |
| | | 472) | NFYPREAKVQWKVDNALQSGNS | WESNGQPENNYKTTPPVLDSDGSFFLYSKLTVDKSRWQQGNVFSCSV |
| | | VH]:: huIgG1zSEFL2-2 | QESVTEQDSKDSTYSLSSTLTLSK | MHEALHNHYTQKSLSLSPGK (SEQ ID NO: 3923) |
| | | (mAb) | ADYEKHKVYACEVTHQGLSSPVT | |
| | | | KSFNRGEC (SEQ ID NO: 3632) | |
| PL- | iPS: | VK1:huGLP1(G29V, | HSEGTFTSDVSSYLEEQAAKEFIE | QVQLVESGGGVVQPGRSLRLSCAASGFTFSNYGMHWVRQAPGEGLEW |
| 54081 | 547340 | A2S):: [hu anti- | WLKNVGGGGGGAGGGGAGGGG | VAAIWFDASDKYYADAVKGRFTISRDNSKNTLYLQMNSLRAEDTAVY |
| | | <huGIPR> | AGGGGEIVLTQSPATLSLSPGERA | YCARDLAIFGVVPDYWGQGTLVTVSSASTKGPSVFPLAPSSKSTSGGTA |
| | | G29V(A2S)_529367 | TLSCRASQSVLSHLAWYQQKPGQ | ALGCLVKDYFPEPVTVSWNSGALTSGVHTFPAVLQSSGLYSLSSVVTV |
| | | VK3(1-286) | APRLLIYEAATRATGIPDRFSGSG | PSSSLGTQTYICNVNHKPSNTKVDKKVEPKSCDKTHTCPPCPAPELLGG |
| | | VL]:: huKLC-CL + [hu | SGTEFTLTISRLEPEDFAVYYCQQ | PSVFLFPPKPKDTLMISRTPEVTCVVVDVSHEDPEVKFNWYVDGVEVH |
| | | anti-<huGIPR> | YQNWPLTFGGGTKVEIKRTVAAP | NAKTKPCEEQYGSTYRCVSVLTVLHQDWLNGKEYKCKVSNKALPAPI |
| | | G29E_471439_VH3(1- | SVFIFPPSDEQLKSGTASVVCLLN | EKTISKAKGQPREPQVYTLPPSREEMTKNQVSLTCLVKGFYPSDIAVEW |
| | | 472) | NFYPREAKVQWKVDNALQSGNS | ESNGQPENNYKTTPPVLDSDGSFFLYSKLTVDKSRWQQGNVFSCSVMH |
| | | VH]:: huIgG1zSEFL2-2 | QESVTEQDSKDSTYSLSSTLTLSK | EALHNHYTQKSLSLSPGK (SEQ ID NO: 3924) |
| | | (mAb) | ADYEKHKVYACEVTHQGLSSPVT | |
| | | | KSFNRGEC (SEQ ID NO: 3633) | |
| PL- | iPS: | VK1:huGLP1(G29V, | HSEGTFTSDVSSYLEEQAAKEFIE | QVQLVESGGGVVQPGRSLRLSCAASGFTFSNYGMHWVRQAPGEGLEW |
| 54082 | 547344 | A2S):: [hu anti- | WLKNVGGGGGGAGGGGAGGGG | VAAIWFDASDKYYADAVKGRFTISRDNSKNTLYLQMNSLRAEDTAVY |
| | | <huGIPR> | AGGGGEIVLTQSPATLSLSPGERA | YCARDLAIFGVVPDYWGQGTLVTVSSASTKGPSVFPLAPSSKSTSGGTA |
| | | G29V(A2S)_529368 | TLSCRASQSVDLHLAWYQQKPG | ALGCLVKDYFPEPVTVSWNSGALTSGVHTFPAVLQSSGLYSLSSVVTV |
| | | VK3(1-286) | QAPRLLIYEAATRATGIPDRFSGS | PSSSLGTQTYICNVNHKPSNTKVDKKVEPKSCDKTHTCPPCPAPELLGG |
| | | VL]:: huKLC-CL + [hu | GSGTEFTLTISRLEPEDFAVYYCQ | PSVFLFPPKPKDTLMISRTPEVTCVVVDVSHEDPEVKFNWYVDGVEVH |
| | | anti-<huGIPR> | QYQNWPLTFGGGTKVEIKRTVAA | NAKTKPCEEQYGSTYRCVSVLTVLHQDWLNGKEYKCKVSNKALPAPI |
| | | G29E_471439_VH3(1- | PSVFIFPPSDEQLKSGTASVVCLL | EKTISKAKGQPREPQVYTLPPSREEMTKNQVSLTCLVKGFYPSDIAVEW |
| | | 472) | NNFYPREAKVQWKVDNALQSGN | ESNGQPENNYKTTPPVLDSDGSFFLYSKLTVDKSRWQQGNVFSCSVMH |
| | | VH]:: huIgG1zSEFL2-2 | SQESVTEQDSKDSTYSLSSTLTLS | EALHNHYTQKSLSLSPGK (SEQ ID NO: 3925) |
| | | (mAb) | KADYEKHKVYACEVTHQGLSSP | |
| | | | VTKSFNRGEC (SEQ ID NO: 3634) | |
| PL- | iPS: | VK1:huGLP1(K28Q): | HGEGTFTSDVSSYLEEQAAKEFIE | QVQLVESGGGVVQPGRSLRLSCAASGFTFSNYGMHWVRQAPGEGLEW |
| 54094 | 547348 | (G4:: [hu anti- | WLKQGGGGGGGAGGGGAGGGG | VAAIWFDASDKYYADAVKGRFTISRDNSKNTLYLQMNSLRAEDTAVY |
| | | <huGIPR> | AGGGGEIVMTQSPATLSVSPGER | YCARDQAIFGVVPDYWGQGTLVTVSSASTKGPSVFPLAPSSKSTSGGT |
| | | K28Q_361174 VK3(1- | ATLSCRASQSVSSNLAWYQQKPG | AALGCLVKDYFPEPVTVSWNSGALTSGVHTFPAVLQSSGLYSLSSVVT |
| | | 286)VL]:: huKLC-CL + | QAPRLLIYGAATRATGIPARFSGS | VPSSSLGTQTYICNVNHKPSNTKVDKKVEPKSCDKTHTCPPCPAPELLG |
| | | [hu anti-<huGIPR> | GSGTEFTLTISSLQSEDFAVYYCQ | GPSVFLFPPKPKDTLMISRTPEVTCVVVDVSHEDPEVKFNWYVDGVEV |
| | | SST200067 VH3(1- | QYNNWPLTFGGGTKVEIKRTVAA | HNAKTKPCEEQYGSTYRCVSVLTVLHQDWLNGKEYKCKVSNKALPAP |
| | | 472) | PSVFIFPPSDEQLKSGTASVVCLL | IEKTISKAKGQPREPQVYTLPPSREEMTKNQVSLTCLVKGFYPSDIAVE |
| | | VH]:: huIgG1zSEFL2-2 | NNFYPREAKVQWKVDNALQSGN | WESNGQPENNYKTTPPVLDSDGSFFLYSKLTVDKSRWQQGNVFSCSV |
| | | (mAb) | SQESVTEQDSKDSTYSLSSTLTLS | MHEALHNHYTQKSLSLSPGK (SEQ ID NO: 3926) |
| | | | KADYEKHKVYACEVTHQGLSSP | |
| | | | VTKSFNRGEC (SEQ ID NO: 3635) | |
| PL- | iPS: | VK1:huGLP1(K28Q): | HGEGTFTSDVSSYLEEQAAKEFIE | QVQLVESGGGVVQPGRSLRLSCAASGFTFSNYGMHWVRQAPGEGLEW |
| 54096 | 547355 | (G4:: [hu anti- | WLKQGGGGGGGAGGGGAGGGG | VAAIWFDASDKYYADAVKGRFTISRDNSKNTLYLQMNSLRAEDTAVY |
| | | <huGIPR> | AGGGGEIVMTQSPATLSVSPGER | YCARDLAIFGVVPDYWGQGTLVTVSSASTKGPSVFPLAPSSKSTSGGTA |
| | | K28Q_471479 VK3(1- | ATLSCRASQSVDLHLAWYQQKP | ALGCLVKDYFPEPVTVSWNSGALTSGVHTFPAVLQSSGLYSLSSVVTV |
| | | 286)VL]:: huKLC-CL + | GQAPRLLIYEAATRATGIPARFSG | PSSSLGTQTYICNVNHKPSNTKVDKKVEPKSCDKTHTCPPCPAPELLGG |
| | | [hu anti-<huGIPR> | SGSGTEFTLTISSLQSEDFAVYYC | PSVFLFPPKPKDTLMISRTPEVTCVVVDVSHEDPEVKFNWYVDGVEVH |
| | | G29E_471439_VH3(1- | QQYQNWPLTFGGGTKVEIKRTVA | NAKTKPCEEQYGSTYRCVSVLTVLHQDWLNGKEYKCKVSNKALPAPI |
| | | 472) | APSVFIFPPSDEQLKSGTASVVCL | EKTISKAKGQPREPQVYTLPPSREEMTKNQVSLTCLVKGFYPSDIAVEW |
| | | VH]:: huIgG1zSEFL2-2 | LNNFYPREAKVQWKVDNALQSG | ESNGQPENNYKTTPPVLDSDGSFFLYSKLTVDKSRWQQGNVFSCSVMH |
| | | (mAb) | NSQESVTEQDSKDSTYSLSSTLTL | EALHNHYTQKSLSLSPGK (SEQ ID NO: 3927) |
| | | | SKADYEKHKVYACEVTHQGLSSP | |
| | | | VTKSFNRGEC (SEQ ID NO: 3636) | |
| PL- | iPS: | VK1:huGLP1(K28Q): | HGEGTFTSDVSSYLEEQAAKEFIE | QVQLVESGGGVVQPGRSLRLSCAASGFTFSNYGMHWVRQAPGEGLEW |
| 54097 | 547359 | (G4:: [hu anti- | WLKQGGGGGGGAGGGGAGGGG | VAAIWFDASDKYYADAVKGRFTISRDNSKNTLYLQMNSLRAEDTAVY |
| | | <huGIPR> | AGGGGEIVLTQSPATLSLSPGERA | YCARDQAIFGVVPDYWGQGTLVTVSSASTKGPSVFPLAPSSKSTSGGT |
| | | K28Q_529362 VK3(1- | TLSCRASQSVSSNLAWYQQKPGQ | AALGCLVKDYFPEPVTVSWNSGALTSGVHTFPAVLQSSGLYSLSSVVT |
| | | 286)VL]:: huKLC-CL + | APRLLIYGAATRATGIPDRFSGSG | VPSSSLGTQTYICNVNHKPSNTKVDKKVEPKSCDKTHTCPPCPAPELLG |
| | | [hu anti-<huGIPR> | SGTEFTLTISRLEPEDFAVYYCQQ | GPSVFLFPPKPKDTLMISRTPEVTCVVVDVSHEDPEVKFNWYVDGVEV |
| | | SST200067 VH3(1- | YNNWPLTFGGGTKVEIKRTVAAP | HNAKTKPCEEQYGSTYRCVSVLTVLHQDWLNGKEYKCKVSNKALPAP |
| | | 472) | SVFIFPPSDEQLKSGTASVVCLLN | IEKTISKAKGQPREPQVYTLPPSREEMTKNQVSLTCLVKGFYPSDIAVE |
| | | VH]:: huIgG1zSEFL2-2 | NFYPREAKVQWKVDNALQSGNS | WESNGQPENNYKTTPPVLDSDGSFFLYSKLTVDKSRWQQGNVFSCSV |
| | | (mAb) | QESVTEQDSKDSTYSLSSTLTLSK | MHEALHNHYTQKSLSLSPGK (SEQ ID NO: 3928) |
| | | | ADYEKHKVYACEVTHQGLSSPVT | |
| | | | KSFNRGEC (SEQ ID NO: 3637) | |
| PL- | iPS: | VK1:huGLP1(K28Q): | HGEGTFTSDVSSYLEEQAAKEFIE | QVQLVESGGGVVQPGRSLRLSCAASGFTFSNYGMHWVRQAPGEGLEW |
| 54098 | 547363 | (G4:: [hu anti- | WLKQGGGGGGGAGGGGAGGGG | VAAIWFDASDKYYADAVKGRFTISRDNSKNTLYLQMNSLRAEDTAVY |
| | | <huGIPR> | AGGGGEIVLTQSPATLSLSPGERA | YCARDLAIFGVVPDYWGQGTLVTVSSASTKGPSVFPLAPSSKSTSGGTA |
| | | K28Q_529367 VK3(1- | TLSCRASQSVLSHLAWYQQKPGQ | ALGCLVKDYFPEPVTVSWNSGALTSGVHTFPAVLQSSGLYSLSSVVTV |
| | | 286)VL]:: huKLC-CL + | APRLLIYEAATRATGIPDRFSGSG | PSSSLGTQTYICNVNHKPSNTKVDKKVEPKSCDKTHTCPPCPAPELLGG |
| | | [hu anti-<huGIPR> | SGTEFTLTISRLEPEDFAVYYCQQ | PSVFLFPPKPKDTLMISRTPEVTCVVVDVSHEDPEVKFNWYVDGVEVH |
| | | G29E_471439_VH3(1- | YQNWPLTFGGGTKVEIKRTVAAP | NAKTKPCEEQYGSTYRCVSVLTVLHQDWLNGKEYKCKVSNKALPAPI |
| | | 472) | SVFIFPPSDEQLKSGTASVVCLLN | EKTISKAKGQPREPQVYTLPPSREEMTKNQVSLTCLVKGFYPSDIAVEW |
| | | VH]:: huIgG1zSEFL2-2 | NFYPREAKVQWKVDNALQSGNS | ESNGQPENNYKTTPPVLDSDGSFFLYSKLTVDKSRWQQGNVFSCSVMH |
| | | (mAb) | QESVTEQDSKDSTYSLSSTLTLSK | EALHNHYTQKSLSLSPGK (SEQ ID NO: 3929) |
| | | | ADYEKHKVYACEVTHQGLSSPVT | |
| | | | KSFNRGEC (SEQ ID NO: 3638) | |
| PL- | iPS: | VK1:huGLP1(K28Q): | HGEGTFTSDVSSYLEEQAAKEFIE | QVQLVESGGGVVQPGRSLRLSCAASGFTFSNYGMHWVRQAPGEGLEW |
| 54103 | 547367 | (G4:: [hu anti- | WLKQGGGGGGGAGGGGAGGGG | VAAIWFDASDKYYADAVKGRFTISRDNSKNTLYLQMNSLRAEDTAVY |
| | | <huGIPR> | AGGGGEIVLTQSPATLSLSPGERA | YCARDLAIFGVVPDYWGQGTLVTVSSASTKGPSVFPLAPSSKSTSGGTA |
| | | K28Q_529368 VK3(1- | TLSCRASQSVDLHLAWYQQKPG | ALGCLVKDYFPEPVTVSWNSGALTSGVHTFPAVLQSSGLYSLSSVVTV |
| | | 286)VL]:: huKLC-CL + | QAPRLLIYEAATRATGIPDRFSGS | PSSSLGTQTYICNVNHKPSNTKVDKKVEPKSCDKTHTCPPCPAPELLGG |
| | | [hu anti-<huGIPR> | GSGTEFTLTISRLEPEDFAVYYCQ | PSVFLFPPKPKDTLMISRTPEVTCVVVDVSHEDPEVKFNWYVDGVEVH |
| | | G29E_471439_VH3(1- | QYQNWPLTFGGGTKVEIKRTVAA | NAKTKPCEEQYGSTYRCVSVLTVLHQDWLNGKEYKCKVSNKALPAPI |
| | | 472) | PSVFIFPPSDEQLKSGTASVVCLL | EKTISKAKGQPREPQVYTLPPSREEMTKNQVSLTCLVKGFYPSDIAVEW |
| | | VH]:: huIgG1zSEFL2-2 | NNFYPREAKVQWKVDNALQSGN | ESNGQPENNYKTTPPVLDSDGSFFLYSKLTVDKSRWQQGNVFSCSVMH |
| | | (mAb) | SQESVTEQDSKDSTYSLSSTLTLS | EALHNHYTQKSLSLSPGK (SEQ ID NO: 3930) |
| | | | KADYEKHKVYACEVTHQGLSSP | |
| | | | VTKSFNRGEC (SEQ ID NO: 3639) | |
| PL- | iPS: | VK1:huGLP1(K28Q, | HSEGTFTSDVSSYLEEQAAKEFIE | QVQLVESGGGVVQPGRSLRLSCAASGFTFSNYGMHWVRQAPGEGLEW |
| 54089 | 547371 | A2S):: [hu anti- | WLKQGGGGGGGAGGGGAGGGG | VAAIWFDASDKYYADAVKGRFTISRDNSKNTLYLQMNSLRAEDTAVY |
| | | <huGIPR> | AGGGGEIVMTQSPATLSVSPGER | YCARDQAIFGVVPDYWGQGTLVTVSSASTKGPSVFPLAPSSKSTSGGT |
| | | K28Q(A2S)_361174 | ATLSCRASQSVSSNLAWYQQKPG | AALGCLVKDYFPEPVTVSWNSGALTSGVHTFPAVLQSSGLYSLSSVVT |
| | | VK3(1-286) | QAPRLLIYGAATRATGIPARFSGS | VPSSSLGTQTYICNVNHKPSNTKVDKKVEPKSCDKTHTCPPCPAPELLG |
| | | VL]:: huKLC-CL + [hu | GSGTEFTLTISSLQSEDFAVYYCQ | GPSVFLFPPKPKDTLMISRTPEVTCVVVDVSHEDPEVKFNWYVDGVEV |
| | | anti-<huGIPR> | QYNNWPLTFGGGTKVEIKRTVAA | HNAKTKPCEEQYGSTYRCVSVLTVLHQDWLNGKEYKCKVSNKALPAP |
| | | SST200067 VH3(1- | PSVFIFPPSDEQLKSGTASVVCLL | IEKTISKAKGQPREPQVYTLPPSREEMTKNQVSLTCLVKGFYPSDIAVE |
| | | 472) | NNFYPREAKVQWKVDNALQSGN | WESNGQPENNYKTTPPVLDSDGSFFLYSKLTVDKSRWQQGNVFSCSV |
| | | VH]:: huIgG1zSEFL2-2 | SQESVTEQDSKDSTYSLSSTLTLS | MHEALHNHYTQKSLSLSPGK (SEQ ID NO: 3931) |
| | | (mAb) | KADYEKHKVYACEVTHQGLSSP | |
| | | | VTKSFNRGEC (SEQ ID NO: 3640) | |
| PL- | iPS: | VK1:huGLP1(K28Q, | HSEGTFTSDVSSYLEEQAAKEFIE | QVQLVESGGGVVQPGRSLRLSCAASGFTFSNYGMHWVRQAPGEGLEW |
| 54091 | 547378 | A2S):: [hu anti- | WLKQGGGGGGGAGGGGAGGGG | VAAIWFDASDKYYADAVKGRFTISRDNSKNTLYLQMNSLRAEDTAVY |
| | | <huGIPR> | AGGGGEIVMTQSPATLSVSPGER | YCARDLAIFGVVPDYWGQGTLVTVSSASTKGPSVFPLAPSSKSTSGGTA |
| | | K28Q(A2S)_471479 | ATLSCRASQSVDLHLAWYQQKP | ALGCLVKDYFPEPVTVSWNSGALTSGVHTFPAVLQSSGLYSLSSVVTV |
| | | VK3(1-286) | GQAPRLLIYEAATRATGIPARFSG | PSSSLGTQTYICNVNHKPSNTKVDKKVEPKSCDKTHTCPPCPAPELLGG |
| | | VL]:: huKLC-CL + [hu | SGSGTEFTLTISSLQSEDFAVYYC | PSVFLFPPKPKDTLMISRTPEVTCVVVDVSHEDPEVKFNWYVDGVEVH |
| | | anti-<huGIPR> | QQYQNWPLTFGGGTKVEIKRTVA | NAKTKPCEEQYGSTYRCVSVLTVLHQDWLNGKEYKCKVSNKALPAPI |
| | | G29E_471439_VH3(1- | APSVFIFPPSDEQLKSGTASVVCL | EKTISKAKGQPREPQVYTLPPSREEMTKNQVSLTCLVKGFYPSDIAVEW |
| | | 472) | LNNFYPREAKVQWKVDNALQSG | ESNGQPENNYKTTPPVLDSDGSFFLYSKLTVDKSRWQQGNVFSCSVMH |
| | | VH]:: huIgG1zSEFL2-2 | NSQESVTEQDSKDSTYSLSSTLTL | EALHNHYTQKSLSLSPGK (SEQ ID NO: 3932) |
| | | (mAb) | SKADYEKHKVYACEVTHQGLSSP | |
| | | | VTKSFNRGEC (SEQ ID NO: 3641) | |
| PL- | iPS: | VK1:huGLP1(K28Q, | HSEGTFTSDVSSYLEEQAAKEFIE | QVQLVESGGGVVQPGRSLRLSCAASGFTFSNYGMHWVRQAPGEGLEW |
| 54092 | 547382 | A2S):: [hu anti- | WLKQGGGGGGGAGGGGAGGGG | VAAIWFDASDKYYADAVKGRFTISRDNSKNTLYLQMNSLRAEDTAVY |
| | | <huGIPR> | AGGGGEIVLTQSPATLSLSPGERA | YCARDQAIFGVVPDYWGQGTLVTVSSASTKGPSVFPLAPSSKSTSGGT |
| | | K28Q(A2S)_529362 | TLSCRASQSVSSNLAWYQQKPGQ | AALGCLVKDYFPEPVTVSWNSGALTSGVHTFPAVLQSSGLYSLSSVVT |
| | | VK3(1-286) | APRLLIYGAATRATGIPDRFSGSG | VPSSSLGTQTYICNVNHKPSNTKVDKKVEPKSCDKTHTCPPCPAPELLG |
| | | VL]:: huKLC-CL + [hu | SGTEFTLTISRLEPEDFAVYYCQQ | GPSVFLFPPKPKDTLMISRTPEVTCVVVDVSHEDPEVKFNWYVDGVEV |
| | | anti-<huGIPR> | YNNWPLTFGGGTKVEIKRTVAAP | HNAKTKPCEEQYGSTYRCVSVLTVLHQDWLNGKEYKCKVSNKALPAP |
| | | SST200067 VH3(1- | SVFIFPPSDEQLKSGTASVVCLLN | IEKTISKAKGQPREPQVYTLPPSREEMTKNQVSLTCLVKGFYPSDIAVE |
| | | 472) | NFYPREAKVQWKVDNALQSGNS | WESNGQPENNYKTTPPVLDSDGSFFLYSKLTVDKSRWQQGNVFSCSV |
| | | VH]:: huIgG1zSEFL2-2 | QESVTEQDSKDSTYSLSSTLTLSK | MHEALHNHYTQKSLSLSPGK (SEQ ID NO: 3933) |
| | | (mAb) | ADYEKHKVYACEVTHQGLSSPVT | |
| | | | KSFNRGEC (SEQ ID NO: 3642) | |
| PL- | iPS: | VK1:huGLP1(K28Q, | HSEGTFTSDVSSYLEEQAAKEFIE | QVQLVESGGGVVQPGRSLRLSCAASGFTFSNYGMHWVRQAPGEGLEW |
| 54093 | 547386 | A2S):: [hu anti- | WLKQGGGGGGGAGGGGAGGGG | VAAIWFDASDKYYADAVKGRFTISRDNSKNTLYLQMNSLRAEDTAVY |
| | | <huGIPR> | AGGGGEIVLTQSPATLSLSPGERA | YCARDLAIFGVVPDYWGQGTLVTVSSASTKGPSVFPLAPSSKSTSGGTA |
| | | K28Q(A2S)_529367 | TLSCRASQSVLSHLAWYQQKPGQ | ALGCLVKDYFPEPVTVSWNSGALTSGVHTFPAVLQSSGLYSLSSVVTV |
| | | VK3(1-286) | APRLLIYEAATRATGIPDRFSGSG | PSSSLGTQTYICNVNHKPSNTKVDKKVEPKSCDKTHTCPPCPAPELLGG |
| | | VL]:: huKLC-CL + [hu | SGTEFTLTISRLEPEDFAVYYCQQ | PSVFLFPPKPKDTLMISRTPEVTCVVVDVSHEDPEVKFNWYVDGVEVH |
| | | anti-<huGIPR> | YQNWPLTFGGGTKVEIKRTVAAP | NAKTKPCEEQYGSTYRCVSVLTVLHQDWLNGKEYKCKVSNKALPAPI |
| | | G29E_471439_VH3(1- | SVFIFPPSDEQLKSGTASVVCLLN | EKTISKAKGQPREPQVYTLPPSREEMTKNQVSLTCLVKGFYPSDIAVEW |
| | | 472) | NFYPREAKVQWKVDNALQSGNS | ESNGQPENNYKTTPPVLDSDGSFFLYSKLTVDKSRWQQGNVFSCSVMH |
| | | VH]:: huIgG1zSEFL2-2 | QESVTEQDSKDSTYSLSSTLTLSK | EALHNHYTQKSLSLSPGK (SEQ ID NO: 3934) |
| | | (mAb) | ADYEKHKVYACEVTHQGLSSPVT | |
| | | | KSFNRGEC (SEQ ID NO: 3643) | |
| PL- | iPS: | VK1:huGLP1(K28Q, | HSEGTFTSDVSSYLEEQAAKEFIE | QVQLVESGGGVVQPGRSLRLSCAASGFTFSNYGMHWVRQAPGEGLEW |
| 54104 | 547390 | A2S):: [hu anti- | WLKQGGGGGGGAGGGGAGGGG | VAAIWFDASDKYYADAVKGRFTISRDNSKNTLYLQMNSLRAEDTAVY |
| | | <huGIPR> | AGGGGEIVLTQSPATLSLSPGERA | YCARDLAIFGVVPDYWGQGTLVTVSSASTKGPSVFPLAPSSKSTSGGTA |
| | | K28Q(A2S)_529368 | TLSCRASQSVDLHLAWYQQKPG | ALGCLVKDYFPEPVTVSWNSGALTSGVHTFPAVLQSSGLYSLSSVVTV |
| | | VK3(1-286) | QAPRLLIYEAATRATGIPDRFSGS | PSSSLGTQTYICNVNHKPSNTKVDKKVEPKSCDKTHTCPPCPAPELLGG |
| | | VL]:: huKLC-CL + [hu | GSGTEFTLTISRLEPEDFAVYYCQ | PSVFLFPPKPKDTLMISRTPEVTCVVVDVSHEDPEVKFNWYVDGVEVH |
| | | anti-<huGIPR> | QYQNWPLTFGGGTKVEIKRTVAA | NAKTKPCEEQYGSTYRCVSVLTVLHQDWLNGKEYKCKVSNKALPAPI |
| | | G29E_471439_VH3(1- | PSVFIFPPSDEQLKSGTASVVCLL | EKTISKAKGQPREPQVYTLPPSREEMTKNQVSLTCLVKGFYPSDIAVEW |
| | | 472) | NNFYPREAKVQWKVDNALQSGN | ESNGQPENNYKTTPPVLDSDGSFFLYSKLTVDKSRWQQGNVFSCSVMH |
| | | VH]:: huIgG1zSEFL2-2 | SQESVTEQDSKDSTYSLSSTLTLS | EALHNHYTQKSLSLSPGK (SEQ ID NO: 3935) |
| | | (mAb) | KADYEKHKVYACEVTHQGLSSP | |
| | | | VTKSFNRGEC (SEQ ID NO: 3644) | |
| PL- | iPS: | VK1:huGLP1(G29E): | HGEGTFTSDVSSYLEEQAAKEFIE | QVQLVESGGGVVQPGRSLRLSCAASGFTFSNYGMHWVRQAPGEGLEW |
| 54038 | 552363 | (G4:: [hu anti- | WLKNEGGGGGGAGGGGAGGGG | VAAIWFDASDKYYADAVKGRFTISRDNSKNTLYLQMNSLRAEDTAVY |
| | | <huGIPR> | AGGGGEIVMTQSPATLSVSPGER | YCARDLAIFGVVPDYWGQGTLVTVSSASTKGPSVFPLAPSSKSTSGGTA |
| | | G29E_471439_VK3(1- | ATLSCRASQSVLSHLAWYQQKPG | ALGCLVKDYFPEPVTVSWNSGALTSGVHTFPAVLQSSGLYSLSSVVTV |
| | | 286)VL]:: huKLC-CL + | QAPRLLIYEAATRATGIPARFSGS | PSSSLGTQTYICNVNHKPSNTKVDKKVEPKSCDKTHTCPPCPAPELLGG |
| | | [hu anti-<huGIPR> | GSGTEFTLTISSLQSEDFAVYYCQ | PSVFLFPPKPKDTLMISRTPEVTCVVVDVSHEDPEVKFNWYVDGVEVH |
| | | G29E_471439_VH3(1- | QYQNWPLTFGGGTKVEIKRTVAA | NAKTKPCEEQYGSTYRCVSVLTVLHQDWLNGKEYKCKVSNKALPAPI |
| | | 472) | PSVFIFPPSDEQLKSGTASVVCLL | EKTISKAKGQPREPQVYTLPPSREEMTKNQVSLTCLVKGFYPSDIAVEW |
| | | VH]:: huIgG1zSEFL2-2 | NNFYPREAKVQWKVDNALQSGN | ESNGQPENNYKTTPPVLDSDGSFFLYSKLTVDKSRWQQGNVFSCSVMH |
| | | (mAb) | SQESVTEQDSKDSTYSLSSTLTLS | EALHNHYTQKSLSLSPGK (SEQ ID NO: 3936) |
| | | | KADYEKHKVYACEVTHQGLSSP | |
| | | | VTKSFNRGEC (SEQ ID NO: 3645) | |
| PL- | iPS: | VK1:huGLP1(G29E, | HSEGTFTSDVSSYLEEQAAKEFIE | QVQLVESGGGVVQPGRSLRLSCAASGFTFSNYGMHWVRQAPGEGLEW |
| 54033 | 552367 | A2S):: [hu anti- | WLKNEGGGGGGAGGGGAGGGG | VAAIWFDASDKYYADAVKGRFTISRDNSKNTLYLQMNSLRAEDTAVY |
| | | <huGIPR> | AGGGGEIVMTQSPATLSVSPGER | YCARDLAIFGVVPDYWGQGTLVTVSSASTKGPSVFPLAPSSKSTSGGTA |
| | | G29E(A2S)_471439 | ATLSCRASQSVLSHLAWYQQKPG | ALGCLVKDYFPEPVTVSWNSGALTSGVHTFPAVLQSSGLYSLSSVVTV |
| | | VK3(1-286) | QAPRLLIYEAATRATGIPARFSGS | PSSSLGTQTYICNVNHKPSNTKVDKKVEPKSCDKTHTCPPCPAPELLGG |
| | | VL]:: huKLC-CL + [hu | GSGTEFTLTISSLQSEDFAVYYCQ | PSVFLFPPKPKDTLMISRTPEVTCVVVDVSHEDPEVKFNWYVDGVEVH |
| | | anti-<huGIPR> | QYQNWPLTFGGGTKVEIKRTVAA | NAKTKPCEEQYGSTYRCVSVLTVLHQDWLNGKEYKCKVSNKALPAPI |
| | | G29E_471439_VH3 (1- | PSVFIFPPSDEQLKSGTASVVCLL | EKTISKAKGQPREPQVYTLPPSREEMTKNQVSLTCLVKGFYPSDIAVEW |
| | | 472) | NNFYPREAKVQWKVDNALQSGN | ESNGQPENNYKTTPPVLDSDGSFFLYSKLTVDKSRWQQGNVFSCSVMH |
| | | VH]:: huIgG1zSEFL2-2 | SQESVTEQDSKDSTYSLSSTLTLS | EALHNHYTQKSLSLSPGK (SEQ ID NO: 3937) |
| | | (mAb) | KADYEKHKVYACEVTHQGLSSP | |
| | | | VTKSFNRGEC (SEQ ID NO: 3646) | |
| PL- | iPS: | VK1:huGLP1(G29P): | HGEGTFTSDVSSYLEEQAAKEFIE | QVQLVESGGGVVQPGRSLRLSCAASGFTFSNYGMHWVRQAPGEGLEW |
| 54048 | 552371 | (G4:: [hu anti- | WLKNPGGGGGGAGGGGAGGGG | VAAIWFDASDKYYADAVKGRFTISRDNSKNTLYLQMNSLRAEDTAVY |
| | | <huGIPR> | AGGGGEIVMTQSPATLSVSPGER | YCARDLAIFGVVPDYWGQGTLVTVSSASTKGPSVFPLAPSSKSTSGGTA |
| | | G29P_471439_VK3(1- | ATLSCRASQSVLSHLAWYQQKPG | ALGCLVKDYFPEPVTVSWNSGALTSGVHTFPAVLQSSGLYSLSSVVTV |
| | | 286)VL]:: huKLC-CL + | QAPRLLIYEAATRATGIPARFSGS | PSSSLGTQTYICNVNHKPSNTKVDKKVEPKSCDKTHTCPPCPAPELLGG |
| | | [hu anti-<huGIPR> | GSGTEFTLTISSLQSEDFAVYYCQ | PSVFLFPPKPKDTLMISRTPEVTCVVVDVSHEDPEVKFNWYVDGVEVH |
| | | G29E_471439_VH3(1- | QYQNWPLTFGGGTKVEIKRTVAA | NAKTKPCEEQYGSTYRCVSVLTVLHQDWLNGKEYKCKVSNKALPAPI |
| | | 472) | PSVFIFPPSDEQLKSGTASVVCLL | EKTISKAKGQPREPQVYTLPPSREEMTKNQVSLTCLVKGFYPSDIAVEW |
| | | VH]:: huIgG1zSEFL2-2 | NNFYPREAKVQWKVDNALQSGN | ESNGQPENNYKTTPPVLDSDGSFFLYSKLTVDKSRWQQGNVFSCSVMH |
| | | (mAb) | SQESVTEQDSKDSTYSLSSTLTLS | EALHNHYTQKSLSLSPGK (SEQ ID NO: 3938) |
| | | | KADYEKHKVYACEVTHQGLSSP | |
| | | | VTKSFNRGEC (SEQ ID NO: 3647) | |
| PL- | iPS: | VK1:huGLP1(G29P, | HSEGTFTSDVSSYLEEQAAKEFIE | QVQLVESGGGVVQPGRSLRLSCAASGFTFSNYGMHWVRQAPGEGLEW |
| 54042 | 552375 | A2S):: [hu anti- | WLKNPGGGGGGAGGGGAGGGG | VAAIWFDASDKYYADAVKGRFTISRDNSKNTLYLQMNSLRAEDTAVY |
| | | <huGIPR> | AGGGGEIVMTQSPATLSVSPGER | YCARDLAIFGVVPDYWGQGTLVTVSSASTKGPSVFPLAPSSKSTSGGTA |
| | | G29P(A2S)_471439 | ATLSCRASQSVLSHLAWYQQKPG | ALGCLVKDYFPEPVTVSWNSGALTSGVHTFPAVLQSSGLYSLSSVVTV |
| | | VK3(1-286) | QAPRLLIYEAATRATGIPARFSGS | PSSSLGTQTYICNVNHKPSNTKVDKKVEPKSCDKTHTCPPCPAPELLGG |
| | | VL]:: huKLC-CL + [hu | GSGTEFTLTISSLQSEDFAVYYCQ | PSVFLFPPKPKDTLMISRTPEVTCVVVDVSHEDPEVKFNWYVDGVEVH |
| | | anti-<huGIPR> | QYQNWPLTFGGGTKVEIKRTVAA | NAKTKPCEEQYGSTYRCVSVLTVLHQDWLNGKEYKCKVSNKALPAPI |
| | | G29E_471439_VH3(1- | PSVFIFPPSDEQLKSGTASVVCLL | EKTISKAKGQPREPQVYTLPPSREEMTKNQVSLTCLVKGFYPSDIAVEW |
| | | 472) | NNFYPREAKVQWKVDNALQSGN | ESNGQPENNYKTTPPVLDSDGSFFLYSKLTVDKSRWQQGNVFSCSVMH |
| | | VH]:: huIgG1zSEFL2-2 | SQESVTEQDSKDSTYSLSSTLTLS | EALHNHYTQKSLSLSPGK (SEQ ID NO: 3939) |
| | | (mAb) | KADYEKHKVYACEVTHQGLSSP | |
| | | | VTKSFNRGEC (SEQ ID NO: 3648) | |
| PL- | iPS: | VK1: huGLP1(G29Q): | HGEGTFTSDVSSYLEEQAAKEFIE | QVQLVESGGGVVQPGRSLRLSCAASGFTFSNYGMHWVRQAPGEGLEW |
| 54060 | 552379 | (G4:: [hu anti- | WLKNQGGGGGGAGGGGAGGGG | VAAIWFDASDKYYADAVKGRFTISRDNSKNTLYLQMNSLRAEDTAVY |
| | | <huGIPR> | AGGGGEIVMTQSPATLSVSPGER | YCARDLAIFGVVPDYWGQGTLVTVSSASTKGPSVFPLAPSSKSTSGGTA |
| | | G29Q_471439_VK3(1- | ATLSCRASQSVLSHLAWYQQKPG | ALGCLVKDYFPEPVTVSWNSGALTSGVHTFPAVLQSSGLYSLSSVVTV |
| | | 286)VL]:: huKLC-CL + | QAPRLLIYEAATRATGIPARFSGS | PSSSLGTQTYICNVNHKPSNTKVDKKVEPKSCDKTHTCPPCPAPELLGG |
| | | [hu anti-<huGIPR> | GSGTEFTLTISSLQSEDFAVYYCQ | PSVFLFPPKPKDTLMISRTPEVTCVVVDVSHEDPEVKFNWYVDGVEVH |
| | | G29E_471439_VH3(1- | QYQNWPLTFGGGTKVEIKRTVAA | NAKTKPCEEQYGSTYRCVSVLTVLHQDWLNGKEYKCKVSNKALPAPI |
| | | 472) | PSVFIFPPSDEQLKSGTASVVCLL | EKTISKAKGQPREPQVYTLPPSREEMTKNQVSLTCLVKGFYPSDIAVEW |
| | | VH]:: huIgG1zSEFL2-2 | NNFYPREAKVQWKVDNALQSGN | ESNGQPENNYKTTPPVLDSDGSFFLYSKLTVDKSRWQQGNVFSCSVMH |
| | | (mAb) | SQESVTEQDSKDSTYSLSSTLTLS | EALHNHYTQKSLSLSPGK (SEQ ID NO: 3940) |
| | | | KADYEKHKVYACEVTHQGLSSP | |
| | | | VTKSFNRGEC (SEQ ID NO: 3649) | |
| PL- | iPS: | VK1:huGLP1(G29Q, | HSEGTFTSDVSSYLEEQAAKEFIE | QVQLVESGGGVVQPGRSLRLSCAASGFTFSNYGMHWVRQAPGEGLEW |
| 54054 | 552383 | A2S):: [hu anti- | WLKNQGGGGGGAGGGGAGGGG | VAAIWFDASDKYYADAVKGRFTISRDNSKNTLYLQMNSLRAEDTAVY |
| | | <huGIPR> | AGGGGEIVMTQSPATLSVSPGER | YCARDLAIFGVVPDYWGQGTLVTVSSASTKGPSVFPLAPSSKSTSGGTA |
| | | G29Q(A2S)_471439 | ATLSCRASQSVLSHLAWYQQKPG | ALGCLVKDYFPEPVTVSWNSGALTSGVHTFPAVLQSSGLYSLSSVVTV |
| | | VK3(1-286) | QAPRLLIYEAATRATGIPARFSGS | PSSSLGTQTYICNVNHKPSNTKVDKKVEPKSCDKTHTCPPCPAPELLGG |
| | | VL]:huKLC-CL + [hu | GSGTEFTLTISSLQSEDFAVYYCQ | PSVFLFPPKPKDTLMISRTPEVTCVVVDVSHEDPEVKFNWYVDGVEVH |
| | | anti-<huGIPR> | QYQNWPLTFGGGTKVEIKRTVAA | NAKTKPCEEQYGSTYRCVSVLTVLHQDWLNGKEYKCKVSNKALPAPI |
| | | G29E_471439_VH3(1- | PSVFIFPPSDEQLKSGTASVVCLL | EKTISKAKGQPREPQVYTLPPSREEMTKNQVSLTCLVKGFYPSDIAVEW |
| | | 472) | NNFYPREAKVQWKVDNALQSGN | ESNGQPENNYKTTPPVLDSDGSFFLYSKLTVDKSRWQQGNVFSCSVMH |
| | | VH]:: huIgG1zSEFL2-2 | SQESVTEQDSKDSTYSLSSTLTLS | EALHNHYTQKSLSLSPGK (SEQ ID NO: 3941) |
| | | (mAb) | KADYEKHKVYACEVTHQGLSSP | |
| | | | VTKSFNRGEC (SEQ ID NO: 3650) | |
| PL- | iPS: | VK1:huGLP1(G29T): | HGEGTFTSDVSSYLEEQAAKEFIE | QVQLVESGGGVVQPGRSLRLSCAASGFTFSNYGMHWVRQAPGEGLEW |
| 54072 | 552387 | (G4:: [hu anti- | WLKNTGGGGGGAGGGGAGGGG | VAAIWFDASDKYYADAVKGRFTISRDNSKNTLYLQMNSLRAEDTAVY |
| | | <huGIPR> | AGGGGEIVMTQSPATLSVSPGER | YCARDLAIFGVVPDYWGQGTLVTVSSASTKGPSVFPLAPSSKSTSGGTA |
| | | G29T_471439_VK3(1- | ATLSCRASQSVLSHLAWYQQKPG | ALGCLVKDYFPEPVTVSWNSGALTSGVHTFPAVLQSSGLYSLSSVVTV |
| | | 286)VL]:: huKLC-CL + | QAPRLLIYEAATRATGIPARFSGS | PSSSLGTQTYICNVNHKPSNTKVDKKVEPKSCDKTHTCPPCPAPELLGG |
| | | [hu anti-<huGIPR> | GSGTEFTLTISSLQSEDFAVYYCQ | PSVFLFPPKPKDTLMISRTPEVTCVVVDVSHEDPEVKFNWYVDGVEVH |
| | | G29E_471439_VH3(1- | QYQNWPLTFGGGTKVEIKRTVAA | NAKTKPCEEQYGSTYRCVSVLTVLHQDWLNGKEYKCKVSNKALPAPI |
| | | 472) | PSVFIFPPSDEQLKSGTASVVCLL | EKTISKAKGQPREPQVYTLPPSREEMTKNQVSLTCLVKGFYPSDIAVEW |
| | | VH]:: huIgG1zSEFL2-2 | NNFYPREAKVQWKVDNALQSGN | ESNGQPENNYKTTPPVLDSDGSFFLYSKLTVDKSRWQQGNVFSCSVMH |
| | | (mAb) | SQESVTEQDSKDSTYSLSSTLTLS | EALHNHYTQKSLSLSPGK (SEQ ID NO: 3942) |
| | | | KADYEKHKVYACEVTHQGLSSP | |
| | | | VTKSFNRGEC (SEQ ID NO: 3651) | |
| PL- | iPS: | VK1:huGLP1(G29T, | HSEGTFTSDVSSYLEEQAAKEFIE | QVQLVESGGGVVQPGRSLRLSCAASGFTFSNYGMHWVRQAPGEGLEW |
| 54066 | 552391 | A2S):: [hu anti- | WLKNTGGGGGGAGGGGAGGGG | VAAIWFDASDKYYADAVKGRFTISRDNSKNTLYLQMNSLRAEDTAVY |
| | | <huGIPR> | AGGGGEIVMTQSPATLSVSPGER | YCARDLAIFGVVPDYWGQGTLVTVSSASTKGPSVFPLAPSSKSTSGGTA |
| | | G29T(A2S)_471439 | ATLSCRASQSVLSHLAWYQQKPG | ALGCLVKDYFPEPVTVSWNSGALTSGVHTFPAVLQSSGLYSLSSVVTV |
| | | VK3(1-286) | QAPRLLIYEAATRATGIPARFSGS | PSSSLGTQTYICNVNHKPSNTKVDKKVEPKSCDKTHTCPPCPAPELLGG |
| | | VL]:: huKLC-CL + [hu | GSGTEFTLTISSLQSEDFAVYYCQ | PSVFLFPPKPKDTLMISRTPEVTCVVVDVSHEDPEVKFNWYVDGVEVH |
| | | anti-<huGIPR> | QYQNWPLTFGGGTKVEIKRTVAA | NAKTKPCEEQYGSTYRCVSVLTVLHQDWLNGKEYKCKVSNKALPAPI |
| | | G29E_471439_VH3(1- | PSVFIFPPSDEQLKSGTASVVCLL | EKTISKAKGQPREPQVYTLPPSREEMTKNQVSLTCLVKGFYPSDIAVEW |
| | | 472) | NNFYPREAKVQWKVDNALQSGN | ESNGQPENNYKTTPPVLDSDGSFFLYSKLTVDKSRWQQGNVFSCSVMH |
| | | VH]:: huIgG1zSEFL2-2 | SQESVTEQDSKDSTYSLSSTLTLS | EALHNHYTQKSLSLSPGK (SEQ ID NO: 3943) |
| | | (mAb) | KADYEKHKVYACEVTHQGLSSP | |
| | | | VTKSFNRGEC (SEQ ID NO: 3652) | |
| PL- | iPS: | VK1:huGLP1(G29V): | HGEGTFTSDVSSYLEEQAAKEFIE | QVQLVESGGGVVQPGRSLRLSCAASGFTFSNYGMHWVRQAPGEGLEW |
| 54084 | 552395 | (G4:: [hu anti- | WLKNVGGGGGGAGGGGAGGGG | VAAIWFDASDKYYADAVKGRFTISRDNSKNTLYLQMNSLRAEDTAVY |
| | | <huGIPR> | AGGGGEIVMTQSPATLSVSPGER | YCARDLAIFGVVPDYWGQGTLVTVSSASTKGPSVFPLAPSSKSTSGGTA |
| | | G29V_471439_VK3(1- | ATLSCRASQSVLSHLAWYQQKPG | ALGCLVKDYFPEPVTVSWNSGALTSGVHTFPAVLQSSGLYSLSSVVTV |
| | | 286)VL]:: huKLC-CL + | QAPRLLIYEAATRATGIPARFSGS | PSSSLGTQTYICNVNHKPSNTKVDKKVEPKSCDKTHTCPPCPAPELLGG |
| | | [hu anti-<huGIPR> | GSGTEFTLTISSLQSEDFAVYYCQ | PSVFLFPPKPKDTLMISRTPEVTCVVVDVSHEDPEVKFNWYVDGVEVH |
| | | G29E_471439_VH3(1- | QYQNWPLTFGGGTKVEIKRTVAA | NAKTKPCEEQYGSTYRCVSVLTVLHQDWLNGKEYKCKVSNKALPAPI |
| | | 472) | PSVFIFPPSDEQLKSGTASVVCLL | EKTISKAKGQPREPQVYTLPPSREEMTKNQVSLTCLVKGFYPSDIAVEW |
| | | VH]:: huIgG1zSEFL2-2 | NNFYPREAKVQWKVDNALQSGN | ESNGQPENNYKTTPPVLDSDGSFFLYSKLTVDKSRWQQGNVFSCSVMH |
| | | (mAb) | SQESVTEQDSKDSTYSLSSTLTLS | EALHNHYTQKSLSLSPGK (SEQ ID NO: 3944) |
| | | | KADYEKHKVYACEVTHQGLSSP | |
| | | | VTKSFNRGEC (SEQ ID NO: 3653) | |
| PL- | iPS: | VK1:huGLP1(G29V, | HSEGTFTSDVSSYLEEQAAKEFIE | QVQLVESGGGVVQPGRSLRLSCAASGFTFSNYGMHWVRQAPGEGLEW |
| 54078 | 552399 | A2S):: [hu anti- | WLKNVGGGGGGAGGGGAGGGG | VAAIWFDASDKYYADAVKGRFTISRDNSKNTLYLQMNSLRAEDTAVY |
| | | <huGIPR> | AGGGGEIVMTQSPATLSVSPGER | YCARDLAIFGVVPDYWGQGTLVTVSSASTKGPSVFPLAPSSKSTSGGTA |
| | | G29V(A2S)_471439 | ATLSCRASQSVLSHLAWYQQKPG | ALGCLVKDYFPEPVTVSWNSGALTSGVHTFPAVLQSSGLYSLSSVVTV |
| | | VK3(1-286) | QAPRLLIYEAATRATGIPARFSGS | PSSSLGTQTYICNVNHKPSNTKVDKKVEPKSCDKTHTCPPCPAPELLGG |
| | | VL]:: huKLC-CL + [hu | GSGTEFTLTISSLQSEDFAVYYCQ | PSVFLFPPKPKDTLMISRTPEVTCVVVDVSHEDPEVKFNWYVDGVEVH |
| | | anti-<huGIPR> | QYQNWPLTFGGGTKVEIKRTVAA | NAKTKPCEEQYGSTYRCVSVLTVLHQDWLNGKEYKCKVSNKALPAPI |
| | | G29E_471439_VH3(1- | PSVFIFPPSDEQLKSGTASVVCLL | EKTISKAKGQPREPQVYTLPPSREEMTKNQVSLTCLVKGFYPSDIAVEW |
| | | 472) | NNFYPREAKVQWKVDNALQSGN | ESNGQPENNYKTTPPVLDSDGSFFLYSKLTVDKSRWQQGNVFSCSVMH |
| | | VH]:: huIgG1zSEFL2-2 | SQESVTEQDSKDSTYSLSSTLTLS | EALHNHYTQKSLSLSPGK (SEQ ID NO: 3945) |
| | | (mAb) | KADYEKHKVYACEVTHQGLSSP | |
| | | | VTKSFNRGEC (SEQ ID NO: 3654) | |
| PL- | iPS: | VK1:huGLP1(K28Q): | HGEGTFTSDVSSYLEEQAAKEFIE | QVQLVESGGGVVQPGRSLRLSCAASGFTFSNYGMHWVRQAPGEGLEW |
| 54095 | 552403 | (G4:: [hu anti- | WLKQGGGGGGGAGGGGAGGGG | VAAIWFDASDKYYADAVKGRFTISRDNSKNTLYLQMNSLRAEDTAVY |
| | | <huGIPR> | AGGGGEIVMTQSPATLSVSPGER | YCARDLAIFGVVPDYWGQGTLVTVSSASTKGPSVFPLAPSSKSTSGGTA |
| | | K28Q_471439_VK3(1- | ATLSCRASQSVLSHLAWYQQKPG | ALGCLVKDYFPEPVTVSWNSGALTSGVHTFPAVLQSSGLYSLSSVVTV |
| | | 286)VL]:: huKLC-CL + | QAPRLLIYEAATRATGIPARFSGS | PSSSLGTQTYICNVNHKPSNTKVDKKVEPKSCDKTHTCPPCPAPELLGG |
| | | [hu anti-<huGIPR> | GSGTEFTLTISSLQSEDFAVYYCQ | PSVFLFPPKPKDTLMISRTPEVTCVVVDVSHEDPEVKFNWYVDGVEVH |
| | | G29E_471439_VH3(1- | QYQNWPLTFGGGTKVEIKRTVAA | NAKTKPCEEQYGSTYRCVSVLTVLHQDWLNGKEYKCKVSNKALPAPI |
| | | 472 | PSVFIFPPSDEQLKSGTASVVCLL | EKTISKAKGQPREPQVYTLPPSREEMTKNQVSLTCLVKGFYPSDIAVEW |
| | | VH]:: huIgG1zSEFL2-2 | NNFYPREAKVQWKVDNALQSGN | ESNGQPENNYKTTPPVLDSDGSFFLYSKLTVDKSRWQQGNVFSCSVMH |
| | | (mAb) | SQESVTEQDSKDSTYSLSSTLTLS | EALHNHYTQKSLSLSPGK (SEQ ID NO: 3946) |
| | | | KADYEKHKVYACEVTHQGLSSP | |
| | | | VTKSFNRGEC (SEQ ID NO: 3655) | |
| PL- | iPS: | VK1:huGLP1(K28Q, | HSEGTFTSDVSSYLEEQAAKEFIE | QVQLVESGGGVVQPGRSLRLSCAASGFTFSNYGMHWVRQAPGEGLEW |
| 54090 | 552407 | A2S):: [hu anti- | WLKQGGGGGGGAGGGGAGGGG | VAAIWFDASDKYYADAVKGRFTISRDNSKNTLYLQMNSLRAEDTAVY |
| | | <huGIPR> | AGGGGEIVMTQSPATLSVSPGER | YCARDLAIFGVVPDYWGQGTLVTVSSASTKGPSVFPLAPSSKSTSGGTA |
| | | K28Q(A2S)_471439 | ATLSCRASQSVLSHLAWYQQKPG | ALGCLVKDYFPEPVTVSWNSGALTSGVHTFPAVLQSSGLYSLSSVVTV |
| | | VK3(1-286) | QAPRLLIYEAATRATGIPARFSGS | PSSSLGTQTYICNVNHKPSNTKVDKKVEPKSCDKTHTCPPCPAPELLGG |
| | | VL]:: huKLC-CL + [hu | GSGTEFTLTISSLQSEDFAVYYCQ | PSVFLFPPKPKDTLMISRTPEVTCVVVDVSHEDPEVKFNWYVDGVEVH |
| | | anti-<huGIPR> | QYQNWPLTFGGGTKVEIKRTVAA | NAKTKPCEEQYGSTYRCVSVLTVLHQDWLNGKEYKCKVSNKALPAPI |
| | | G29E_471439_VH3(1- | PSVFIFPPSDEQLKSGTASVVCLL | EKTISKAKGQPREPQVYTLPPSREEMTKNQVSLTCLVKGFYPSDIAVEW |
| | | 472) | NNFYPREAKVQWKVDNALQSGN | ESNGQPENNYKTTPPVLDSDGSFFLYSKLTVDKSRWQQGNVFSCSVMH |
| | | VH]:: huIgG1zSEFL2-2 | SQESVTEQDSKDSTYSLSSTLTLS | EALHNHYTQKSLSLSPGK (SEQ ID NO: 3947) |
| | | (mAb) | KADYEKHKVYACEVTHQGLSSP | |
| | | | VTKSFNRGEC (SEQ ID NO: 3656) | |

### Transient Expression

[0374] GLP1 GIPR mAb fusion polypeptides of which the first 22 amino acids are the VK1 signal peptide) were transiently expressed in HEK 293-6E cells at 1.5×10⁶ cells/ml, transfected with 0.5 mg/L DNA (0.1 mg/L GLP1 GIPR in pTT5 vector with 0.4 mg/L empty pTT5 vector) (Durocher et al. NRCC, Nucleic Acids. Res. (2002) 30, e9) with 4 ml PEI/mg DNA in F17 media (Thermo Fisher). Yeastolate and Glucose were added to cultures 1 hour after transfection. Cells were grown in suspension in F17 expression medium supplemented with 0.1% Kolliphor, 6 mM L-Glutamine and 50 pg/ml Geneticin for 6 days and harvested for purification.

### Stable Expression

[0375] GLP1 GIPR mAb fusion polypeptides of which the first 22 amino acids are the VK1 signal peptide) were stably expressed in suspension adapted CHO-K1 cells with the corresponding cDNAs. Transfections were performed using Lipofectamine LTX (Thermo Fisher) according to the manufacturer's protocol. Briefly, a total of 30-36 μg of the mammalian expression plasmid DNA was used at a 1:1 ratio for the antibody fusion dimer. For each, the plasmid DNA was added to 3-4 ml OPTI-MEM (Thermo Fisher) and mixed. In a separate tubes, 72-75 μl Lipofectamine LTX was added to 3-4 ml OPTI-MEM. The solutions were then incubated for 5 minutes at room temperature. To form the transfection complex, the DNA and Lipofectamine LTX mixtures for each were combined and incubated at room temperature for an additional 20 minutes.

[0376] Log phase CHO-KI cells were pelleted by centrifugation (1200-1500 RPM for 5 minutes), washed one time with 1×PBS (Thermo Fisher) and resuspended to 1.5-2×10⁶ viable cells/mL in OPTI-MEM. For each transfection, 5-6 mL of the washed cells were added to a 125 mL volume shake flask. The DNA transfection complex was then added to the cells. The flasks were incubated at 36° C. with 5% CO2, shaking at 150 RPM for 6 hours. To stop the transfection, 9-12 ml growth media was added to each flask, and cells were incubated for 48 to 72 hours.

[0377] To begin selection, cells were pelleted by centrifugation (1200-1500 RPM for 5 minutes) 72 hours post-transfection and, the media was replaced with 23-25 mL of growth media supplemented with antibiotics. Selection media was changed 2-3 times per week, diluting cultures when needed to ensure cultures did not over-grow (≤5-6×10⁶ vc/mL), until cell viability and density recovered.

[0378] Large scale productions (2.3 L-2.5 L) were carried out in shake flasks at 36° C. Productions were seeded at 2×10⁶ vc/mL in production media. Conditioned media was harvested on day 5 by centrifugation followed by filtration (0.45 μm).

### Purification

[0379] Cell culture media containing recombinantly expressed anti-GIPR antibody GLP1 fusions were loaded directly onto MabSelect SuRE (MSS) columns. Following loading, each MSS column was washed with 5 column volumes of 25 mM Tris-HCl, 100 mM Sodium Chloride, pH 7.4. The MSS column was further washed with 3 column volumes of 25 mM Tri-HCl, 500 mM L-Arginine, pH 7.5 and then washed with an additional 5 column volume of Tris-HCl, 100 mM Sodium Chloride, pH 7.4. Finally, the bound anti GIPR antibody GLP1 fusion molecules were eluted with 100 mM Sodium Acetate, pH 3.6. The MSS elutions were collected in sterile containers and immediately titrated with 2 M Tris-Base, pH 9.2 to a final pH of 5.8. The pH adjusted MSS elutions were filtered with 0.2 μm PES membrane for the next step which was cation exchange purification.

[0380] The pH adjusted MSS elution pools were loaded onto a cation exchange column SP Sepharose HP (SP HP) equilibrated with 20 mM 2-morpholin-4-ium-4-ylethanesulfonate (MES), pH 6.2. The column was washed with 3 column volumes of 20 mM MES, pH 6.2 and then the bound proteins were eluted with a linear gradient (20 column volume gradient from 0 to 140 mM sodium chloride, then an additional 10 column volume gradient from 140 mM sodium chloride to 160 mM sodium chloride). Following the linear gradient, the remaining bound material was removed by step elution of 20 mM MES, 400 mM sodium chloride, pH 6.2. Alternatively, for some constructs a 20 column volume gradient of 0 to 160 mM NaCl or 0 to 240 mM NaCl in 20 mM MES, pH 6.2 were used to eluted the bound protein. The UV-VIS threshold of 50 or 100 mAU was set for the collection of 0.25 column volume fractions for 1 to 53 ml columns and 0.05 column volume fractions for 245 ml columns. The purity of the cation exchange fractions were evaluated by analytical size exclusion, Caliper micro-capillary electrophoresis (Perkin Elmer) and mass spectrophotometry. The cation exchange fractions selected for the highest purity and yield were pooled and filtered with 0.2 μm MES membrane filter. The SP HP pools were buffer exchanged with 10 mM Potassium Phosphate, 160 mM L-Arginine, pH 6.0 and concentrated to the desired concentration with 30 kDa molecular cut off PES membrane. The formulated pools were filtered with 0.2 μm PES membrane and then stored at −80° C. Examples of the final yield and purity by size exclusion chromatography is shown in FIGS. 4 and 9.

### GLP-1 Agonist Activity

[0381] CHOK1 cells stably expressing the human GLP-1R were used to measure peptide or recombinant fusion-induced cAMP production in a homogeneous time-resolved fluorescence (HTRF) assay according to the manufacturer's instructions (CISBIO, cat #62AM4PEJ). Serial diluted peptides or recombinant fusions were incubated with 40,000 cells in assay buffer (0.1% BSA, 500 uM IBMX in F12 media) for 15 min at 37° C. Cells were then lysed with lysis buffer containing cAMP-d2 and cAMP cryptate (CISBIO) and incubated for 1 hour at room temperature before being measured in Evision plate reader (PerkinElmer). The cAMP levels were expressed as a fluorescence ratio of 665/620 nm. The GLP-1 activity assessments of both synthetic peptides is shown in FIGS. 1 and 2. The GLP-1 activity assessments of the recombinant molecules is shown in FIGS. 4, 9, 14, 15, 16, 17, 19, 23 and 29.

### GIPR Antagonist Activity

[0382] HEK 293T cells stably expressing the human GIPR were used to measure peptide or recombinant fusion-induced cAMP generation in HTRF assay according to the manufacturer's instructions (Cisbio, cat #62AM4PEJ). Serial diluted recombinant fusions or GIPR antibody were incubated with 30,000 cells in assay buffer (0.1% BSA, 500 uM IBMX in F12 media) for 30 min at 37° C. before treatment with GIP at final concentration of 0.05 nM. Cells were incubated for 30 min at 37° C. and then lysed in lysis buffer containing cAMP-d2 and cAMP cryptate (CISBIO) for 1 hour at room temperature. The fluorescence was measured in Evision plate reader (PerkinElmer) and the cAMP levels are expressed as a ratio of 665/620 nm. The GIPR antagonist activity assessments of the recombinant molecules is shown in FIGS. 4, 9, 14, 15, 16, 17, 19, 23 and 29.

### Pharmacokinetic Studies

[0383] Preliminary pharmacokinetic (PK) studies were conducted with CD-1 mice. The general design of the PK studies is outlined in FIGS. 26 and 30. GIPR-GLP1 bispecific fusion constructs were dosed to Male CD-1 mice by intravenous bolus administration. Blood samples were taken at each time point post-dose. All plasma specimens were stored at approximately −70° C. (+10° C.) until transferred for subsequent analysis.

[0384] For LC-MS/MS, fusion construct stock solutions (1 mg/mL) were made from reference standards in A5Su buffer and stored at −70° C. 1 mg/mL fusion construct stock solutions were used to prepare 100 μg/mL working solution in A5Su buffer and were stored in a refrigerator at 2 to 8° C. Standard samples were prepared in CD-1 mouse plasma. Standards concentrations of 100, 250, 500, 1000, 2500, 5000 and 10,000 ng/mL were prepared by serial dilution of a freshly prepared 10,000 ng/mL solution in mouse plasma using the 100 μg/mL fusion construct working solution. 25 μl mouse plasma samples were aliquoted into the appropriate well of a 96-well plate, followed by the addition of 25 μL of magnetic beads immobilized with anti-human Fc capture antibody Ab35. Samples were then incubated for 60 min at room temperature. After washing with 250 mM NH₄HCO₃ buffer, the beads were denatured using 8 M urea and reduced by tris(2-carboxyethyl) phosphine (TCEP), and followed by trypsin digestion. After quenched with formic acid, samples were centrifuged and the supernatant was transferred to a 96-well plate then injected (10 μL) onto the LC-MS/MS system for analysis.

[0385] The LC-MS/MS consisted of an Acquity UPLC system (Waters, Milford, MA) coupled to a 5500 QTRAP mass spectrometer (AB Sciex, Toronto, Canada) with a Turbo IonSpray® ionization source. The analytical column was an Acquity UPLC BEH C18 column (2.1 mm×100 mm). The mobile phases were 0.1% formic acid in water (mobile phase A) and 0.1% formic acid in acetonitrile (mobile phase B). Data was collected and processed using AB Sciex Analyst® software (version 1.5).

[0386] The calibration curve was derived from the peak area ratios (fusion construct tryptic surrogate peptide/internal standard) versus the concentrations of the corresponding fusion construct standards using 1/x² weighted linear least-squares regression. The regression equations from the calibration standards was used to back calculate the measured concentrations for each standard and plasma samples.

[0387] Two assays for GIPr-GLP1 fusion constructs

### Intact Fusion Assay:

[0388] Immunoprecipitation capture/detection: Ab 35 (anti-huFc)—GLP1 N-term peptide

### Total Antibody Assay:

[0389] Immunoprecipitation capture/detection: Ab 35 (anti-huFc)—huFc peptide

[0390] Noncompartmental analysis was performed on individual mouse plasma concentration-nominal time data using Phoenix® WinNonlin® (version 6.4; Certara, Princeton, NJ). Individual concentration values less than the lower limit of qualification (LLOQ, 250 ng/mL) were reported as below the quantitation limit (BQL) and set to zero for the calculation of summary statistics. Mean concentration values less than the LLOQ were not reported or plotted. All concentrations values less than the LLOQ were excluded from the noncompartmental analysis. Nominal doses and nominal sampling times were used for PK analysis.

[0391] The following PK parameters were estimated:

[0392] The initial concentration (C₀) value after intravenous administration was estimated by back extrapolation to time zero using the first 2 observed declining concentration values.

[0393] The area under the concentration-time curve from time zero to infinity (AUCinf) was calculated by the linear trapezoidal method.

[0394] The terminal-phase half-life (t_{1/2,z}) was calculated as ln 2/λ_{z}, λ_{z} is the first-order rate constant of drug associated with the terminal portion of the curve.

[0395] Systemic clearance (CL) was calculated as:

[0396] CL=Dose/AUCinf after intravenous administration

[0397] The pharmacokinetic properties of a select set of the recombinant molecules is shown in FIGS. 7, 12, 20, 21, 22, 24, 27, 31 and 37.

### In Vivo Pharmacodynamic Studies

[0398] Diabetic mice were selected primarily to screen for GLP-1 activity of our bispecific molecules. Molecules were selected based on their potential to reduce plasma glucose levels at different time points post injection. In addition, body weight loss or inhibition of body weight gain was also measured indicative of GLP-1 activity, GIPR inhibition, or a combination of both, either from co-administration of each or from the bispecific molecule. Diet-induced obese mice (DIO) were also used as a model to measure weight loss effects from treatment with different molecules.

[0399] Male db/db mice (#642) were obtained from Jackson Laboratories (Bar Harbor, ME) and delivered at 8-9 weeks of age. Upon arrival, mice were group-housed at four per cage and maintained in controlled environmental conditions with 12 hour light (6:30 AM-6:30 PM) and dark cycles (6:30 PM-6:30 AM). Mice were fed a standard rodent chow diet (2020x Harlan Teklad) with free-access to drinking water.

[0400] Mice were acclimated to environment conditions for one to two weeks. Prior to dosing, mice were handled and body weight measurements were taken. One day prior to dosing, conscious mice were bled from the retro-orbital sinus for plasma glucose measurement using a handheld AlphaTrak glucometer designed for rodent plasma (Zoetis, Parsippany, New Jersey). On the day of dosing, baseline plasma glucose and body weight measurements were taken. The cage mean for plasma glucose and body weight were used to stratify cages into treatment groups. Mice were maintained in their home cages. Following administration of test article, plasma glucose was measured at various time points at (3 and 6 hr) and plasma glucose and body weight measurements were taken every 24 hrs thereafter. Plasma glucose levels were measured until levels returned to near baseline levels and body weight measurements were taken until the rate of body weight gain was similar to Vehicle-treated control group. Results of the body weight studies for a select set of the recombinant molecules is shown in FIGS. 5, 6, 10 and 11.

[0401] A single study was performed using DIO mice. Male DIO mice (#380050) were obtained from Jackson Laboratories (Bar Harbor, ME) and delivered at 18 weeks of age and 12 weeks on high-fat diet (HFD: D12492, Research Diets, New Brunswick, NJ). Mice were single-housed and acclimated for an additional 5 weeks. The objective of this study was to confirm GIPR Ab effect when fused with GLP-1 at different sites and with different linkers. Since the GLP-1 peptide is the same across all the molecules, the greatest and most sustained body weight loss effect would indicate retention of GIPR Ab activity when fused with GLP-1. The screen molecules were tested with a GIPR Ab that cross-reacts in mice. A different GIPR Ab 2G10 that is minimally active in mice was also used as a negative control. Any of our molecules that behaved like the 2G10 fused GIPR Ab would indicate that our fusion molecule adversely affected GIPR Ab activity. Mice were treated with a single injection of Vehicle, or various bispecific fusion molecules dosed at 0.5 mg/kg. These molecules all consisted of various combinations of the same GLP-1 peptide fused to either the heavy or light chain of GIPR Ab 5G12 by 1 of 2 possible linkers. Body weight was measured daily until body weights began to rebound back to baseline levels. Results of the body weight study for a select set of the recombinant molecules is shown in FIG. 36.

[0402] In an effort to modulate and screen the GLP-1 potency of various bispecific molecules, C57BL6 mice were selected to run acute glucose tolerance tests (IPGTT) following administration of the bispecific molecule as outlined in FIGS. 32 and 34. C57BL6 mice were obtained from Charles River Laboratories (Hollister, CA) and delivered at 8-9 weeks of age. Upon arrival, mice were single-housed to prevent fighting and maintained in controlled environmental conditions with 12 hour light (6:30 AM-6:30 PM) and dark cycles (6:30 PM-6:30 AM). Mice were fed a standard rodent chow diet (2020x Harlan Teklad) with free-access to drinking water.

[0403] Mice were acclimated to environment conditions and handled for one week. On the day of the study, conscious mice were bled from the retro-orbital sinus for plasma glucose measurement using an AlphaTrak meter (Zoetis, Parsippany, New Jersey) and a body weight measurement was also taken. After all mice have been weighed and bled, individual plasma glucose and body weight values were used to stratify mice into treatment groups. Mice were administered by intraperitoneal (IP) injection the test article and placed into a fresh cage and fasted for four hours. Following a four hour fast, a plasma glucose measurement was taken (0 min) and immediately injected with 50% dextrose (2 g/kg, IP, Hospira) for the glucose challenge. Plasma glucose was subsequently measured at 30 and 90 minutes post glucose injection. Fresh chow was weighed and placed back into the cages after the 90 minute plasma glucose measurement. Body weight and food intake was measured approximately every 24 hours post the test article dose to observe the body weight loss and food intake inhibition effects and rebound. Results of the IPGTT on a select set of the recombinant molecules is shown in FIGS. 33 and 35.

LENGTHY TABLES
The patent application contains a lengthy table section. A copy of the table is available in electronic form from the USPTO web site (https://seqdata.uspto.gov/?pageRequest=docDetail&DocID=US20240261421A1). An electronic copy of the table will also be available from the USPTO upon request and payment of the fee set forth in 37 CFR 1.19(b)(3).

The application's sequence listing, which the Patent Office published only in electronic form, follows.

SEQUENCE LISTING (3948 sequences)

SEQ ID NO: 1 - protein, 111 aa, synthetic construct
  REGION 1..111: note = source = /note="Description of Artificial Sequence: Synthetic polypeptide"
QSVLTQPPSASGTPGQRVTISCSGSSSNIGSNTVNWYQHLPGTAPKLLIYTNNQRPSGVPDRFSGSKSGTSASLAISGLQSEDEADYFCATFDDSLNGPVFGGGTKLTVLG

SEQ ID NO: 2 - protein, 108 aa, synthetic construct
  REGION 1..108: note = source = /note="Description of Artificial Sequence: Synthetic polypeptide"
DIQMTQSPSSLSASIGDRVTITCRASQDIRDYLGWYQQKPGKAPKRLIYGASSLQSGVPSRFSGSGSGTEFTLTISSLQPEDFATYYCLQHNNYPFTFGPGTKVDIKR

SEQ ID NO: 3 - protein, 108 aa, synthetic construct; identical to SEQ ID NO: 2
  REGION 1..108: note = source = /note="Description of Artificial Sequence: Synthetic polypeptide"

SEQ ID NO: 4 - protein, 107 aa, synthetic construct
  REGION 1..107: note = source = /note="Description of Artificial Sequence: Synthetic polypeptide"
DIQMTQSPSSLSASVGDRVTITCQASQDISNYLNWYQQKPGKAPKLLIYDASNLETGVPSRFSGSGSGTDFSFTISSLQPEDIATYYCQQYDILLTFGGGTKVEIKR

SEQ ID NO: 5 - protein, 114 aa, synthetic construct
  REGION 1..114: note = source = /note="Description of Artificial Sequence: Synthetic polypeptide"
DIVMTQSPDSLAVSLGERATINCKSSQSVLSSSNNKNYIAWYQQQPGHPPKLLIYWASTRESGVPDRFSGSGSGTDFTLTISSLQAEDVAVFYCQQYYSTPWTFGQGTKVEIKR

SEQ ID NO: 6 - protein, 114 aa, synthetic construct
  REGION 1..114: note = source = /note="Description of Artificial Sequence: Synthetic polypeptide"
DIVMTQSPDSLAVSLGERATINCKSSQSVLSSSNNKNYIAWYQQKPGHPPKLLIYWASTRESGVPDRFSGSGSGTDFTLTISSLQAEDVAVFYCQQYYSTPWTFGQGTKVEIKR

SEQ ID NO: 7 - protein, 114 aa, synthetic construct
  REGION 1..114: note = source = /note="Description of Artificial Sequence: Synthetic polypeptide"
DIVMTQSPDSLSVSLGERATINCKSSQSVLSSSNNKNYLAWYQQKPGQPPNLLIYWTSTRDSGVPDRFSGSGSGTDFTLTINSLQAEDVAVYYCQQYYRTPWTFGQGTKVEIKR

SEQ ID NO: 8 - protein, 114 aa, synthetic construct; identical to SEQ ID NO: 7
  REGION 1..114: note = source = /note="Description of Artificial Sequence: Synthetic polypeptide"

SEQ ID NO: 9 - protein, 109 aa, synthetic construct
  REGION 1..109: note = source = /note="Description of Artificial Sequence: Synthetic polypeptide"
EIVLTQSPGTLSLSPGERATLSCRASQSISYSYLAWYQQKPGQAPRLLIYGASSRATGIPDRFSGSGSGTDFTLTISRQEPDDFAVYYCQQYGSSPLTFGGGTKVEIKR

SEQ ID NO: 10 - protein, 108 aa, synthetic construct
  REGION 1..108: note = source = /note="Description of Artificial Sequence: Synthetic polypeptide"
EIVMTQSPATLSVSPGERATLSCRASQSVSSNLAWYQQKPGQAPRLLIYGAATRATGIPARVSGSGSGTEFTLTISSLQSEDFAVYYCQQYNNWPLTFGGGTKVEIKR

SEQ ID NO: 11 - protein, 108 aa, synthetic construct
  REGION 1..108: note = source = /note="Description of Artificial Sequence: Synthetic polypeptide"
DIQMTQSPSSLSASVGDRVTITCRASQGIRNELGWYQQKPGKAPKRLIYGASSLQSGVPSRFSGSGSGTEFTLTISSLQPEDFVTYYCLQHNSYPFTFGPGTKVDVKR

SEQ ID NO: 12 - protein, 107 aa, synthetic construct
  REGION 1..107: note = source = /note="Description of Artificial Sequence: Synthetic polypeptide"
DIQMTQSPSSLSASVGDRVTITCQASQDITNYLNWYQQKPGKAPKLLIYDASNLEPGVPSRFSGSGSGTDFTFTISSLQPEDIATYYCQQYDDLFTFGPGTKVDIKR

SEQ ID NO: 13 - protein, 108 aa, synthetic construct
  REGION 1..108: note = source = /note="Description of Artificial Sequence: Synthetic polypeptide"
DIQMTQSPSSVSASVGDRVTITCRASQGLIIWLAWYQQKPGKAPKLLIYAASSLQSGVPSRFSGSGSGTDFTLTISSLQPEDFATYYCQQTNSFPPTFGQGTKVEIKR

SEQ ID NO: 14 - protein, 108 aa, synthetic construct; identical to SEQ ID NO: 13
  REGION 1..108: note = source = /note="Description of Artificial Sequence: Synthetic polypeptide"

SEQ ID NO: 15 - protein, 108 aa, synthetic construct
  REGION 1..108: note = source = /note="Description of Artificial Sequence: Synthetic polypeptide"
DIQMTQSPSSLSASVGDRVTITCRASQGIRNELGWYQQKPGKAPKLLIYGASSLQSGVPSRFSGSGSGTEFTLTISSLQPEDFVTYYCLQHNSYPFTFGQGTKVDVKR

SEQ ID NO: 16 - protein, 108 aa, synthetic construct; identical to SEQ ID NO: 15
  REGION 1..108: note = source = /note="Description of Artificial Sequence: Synthetic polypeptide"

SEQ ID NO: 17 - protein, 108 aa, synthetic construct; identical to SEQ ID NO: 15
  REGION 1..108: note = source = /note="Description of Artificial Sequence: Synthetic polypeptide"

SEQ ID NO: 18 - protein, 108 aa, synthetic construct
  REGION 1..108: note = source = /note="Description of Artificial Sequence: Synthetic polypeptide"
DIQMTQSPSSLSASVGDRVTITCRASQGIRNELGWYQQKPGKAPKLLIYGASSLQSGVPSRFSGSGSGTEFTLTISSLQPEDFVTYYCLQHNSYPFTFGPGTKVDVKR

SEQ ID NO: 19 - protein, 108 aa, synthetic construct
  REGION 1..108: note = source = /note="Description of Artificial Sequence: Synthetic polypeptide"
DIQMTQSPSSLSASVGDRVTITCRASQGIRNELGWYQQKPGKAPKRLIYGASSLQSGVPSRFSGSGSGTEFTLTISSLQPEDFVTYYCLQHNSYPFTFGQGTKVDVKR

SEQ ID NO: 20 - protein, 108 aa, synthetic construct; identical to SEQ ID NO: 15
  REGION 1..108: note = source = /note="Description of Artificial Sequence: Synthetic polypeptide"

SEQ ID NO: 21 - protein, 108 aa, synthetic construct
  REGION 1..108: note = source = /note="Description of Artificial Sequence: Synthetic polypeptide"
DIQMTQSPSSLSASIGDRVTITCRASQDIRDYLGWYQQKPGKAPKLLIYGASSLQSGVPSRFSGSGSGTEFTLTISSLQPEDFATYYCLQHNNYPFTFGQGTKVDIKR

SEQ ID NO: 22 - protein, 108 aa, synthetic construct
  REGION 1..108: note = source = /note="Description of Artificial Sequence: Synthetic polypeptide"
DIQMTQSPSSLSASIGDRVTITCRASQDIRDYLGWYQQKPGKAPKRLIYGASSLQSGVPSRFSGSGSGTEFTLTISSLQPEDFATYYCLQHNNYPFTFGQGTKVDIKR

SEQ ID NO: 23 - protein, 108 aa, synthetic construct
  REGION 1..108: note = source = /note="Description of Artificial Sequence: Synthetic polypeptide"
DIQMTQSPSSLSASIGDRVTITCRASQDIRDYLGWYQQKPGKAPKLLIYGASSLQSGVPSRFSGSGSGTEFTLTISSLQPEDFATYYCLQHNNYPFTFGPGTKVDIKR

SEQ ID NO: 24 - protein, 108 aa, synthetic construct; identical to SEQ ID NO: 21
  REGION 1..108: note = source = /note="Description of Artificial Sequence: Synthetic polypeptide"

SEQ ID NO: 25 - protein, 108 aa, synthetic construct; identical to SEQ ID NO: 21
  REGION 1..108: note = source = /note="Description of Artificial Sequence: Synthetic polypeptide"

SEQ ID NO: 26 - protein, 108 aa, synthetic construct; identical to SEQ ID NO: 21
  REGION 1..108: note = source = /note="Description of Artificial Sequence: Synthetic polypeptide"

SEQ ID NO: 27 - protein, 108 aa, synthetic construct; identical to SEQ ID NO: 21
  REGION 1..108: note = source = /note="Description of Artificial Sequence: Synthetic polypeptide"

SEQ ID NO: 28 - protein, 108 aa, synthetic construct
  REGION 1..108: note = source = /note="Description of Artificial Sequence: Synthetic polypeptide"
DIQMTQSPSSLSASIGDRVTITCRASQDLRNYLGWYHQKPGKAPKRLIYGASSLQSGVPSRFSGSGSGTEFTLTISSLQPEDFATYYCLQHNNYPFTFGPGTKVDIKR

SEQ ID NO: 29 - protein, 108 aa, synthetic construct
  REGION 1..108: note = source = /note="Description of Artificial Sequence: Synthetic polypeptide"
DIQMTQSPSSLSASIGDRVTITCRASQDLRNYLGWYQQKPGKAPKLLIYGASSLQSGVPSRFSGSGSGTEFTLTISSLQPEDFATYYCLQHNNYPFTFGPGTKVDIKR

SEQ ID NO: 30 - protein, 108 aa, synthetic construct; identical to SEQ ID NO: 29
  REGION 1..108: note = source = /note="Description of Artificial Sequence: Synthetic polypeptide"

SEQ ID NO: 31 - protein, 108 aa, synthetic construct
  REGION 1..108: note = source = /note="Description of Artificial Sequence: Synthetic polypeptide"
DIQMTQSPSSLSASIGDRVTITCRASQDLRNYLGWYHQKPGKAPKLLIYGASSLQSGVPSRFSGSGSGTEFTLTISSLQPEDFATYYCLQHNNYPFTFGPGTKVDIKR

SEQ ID NO: 32 - protein, 108 aa, synthetic construct
  REGION 1..108: note = source = /note="Description of Artificial Sequence: Synthetic polypeptide"
DIQMTQSPSSLSASIGDRVTITCRASQDLRNYLGWYQQKPGKAPKRLIYGASSLQSGVPSRFSGSGSGTEFTLTISSLQPEDFATYYCLQHNNYPFTFGPGTKVDIKR

SEQ ID NO: 33 - protein, 108 aa, synthetic construct; identical to SEQ ID NO: 32
  REGION 1..108: note = source = /note="Description of Artificial Sequence: Synthetic polypeptide"

SEQ ID NO: 34 - protein, 108 aa, synthetic construct; identical to SEQ ID NO: 31
  REGION 1..108: note = source = /note="Description of Artificial Sequence: Synthetic polypeptide"

SEQ ID NO: 35 - protein, 108 aa, synthetic construct; identical to SEQ ID NO: 28
  REGION 1..108: note = source = /note="Description of Artificial Sequence: Synthetic polypeptide"

SEQ ID NO: 36 - protein, 108 aa, synthetic construct; identical to SEQ ID NO: 29
  REGION 1..108: note = source = /note="Description of Artificial Sequence: Synthetic polypeptide"

SEQ ID NO: 37 - protein, 108 aa, synthetic construct; identical to SEQ ID NO: 29
  REGION 1..108: note = source = /note="Description of Artificial Sequence: Synthetic polypeptide"

SEQ ID NO: 38 - protein, 108 aa, synthetic construct
  REGION 1..108: note = source = /note="Description of Artificial Sequence: Synthetic polypeptide"
DIQMTQSPSSLSASIGDRVTITCRASQDLRNYLGWYQQKPGKAPKLLIYGASSLQSGVPSRFSGSGSGTEFTLTISSLQPEDFATYYCLQHNNYPFTFGQGTKVDIKR

SEQ ID NO: 39 - protein, 108 aa, synthetic construct; identical to SEQ ID NO: 29
  REGION 1..108: note = source = /note="Description of Artificial Sequence: Synthetic polypeptide"

SEQ ID NO: 40 - protein, 107 aa, synthetic construct
  REGION 1..107: note = source = /note="Description of Artificial Sequence: Synthetic polypeptide"
DIQMTQSPSSLSASVGDRVTITCQASQDISNYLNWYQQKPGKAPKLLIYDASNLETGVPSRFSGSGSGTDFSLTISSLQPEDFATYYCQQYDILLTFGGGTKVEIKR

SEQ ID NO: 41 - protein, 107 aa, synthetic construct; identical to SEQ ID NO: 40
  REGION 1..107: note = source = /note="Description of Artificial Sequence: Synthetic polypeptide"

SEQ ID NO: 42 - protein, 107 aa, synthetic construct
  REGION 1..107: note = source = /note="Description of Artificial Sequence: Synthetic polypeptide"
DIQMTQSPSSLSASVGDRVTITCQASQDISNYLNWYQQKPGKAPKLLIYDASNLETGVPSRFSGSGSGTDFSLTISSLQPEDIATYYCQQYDILLTFGGGTKVEIKR

SEQ ID NO: 43 - protein, 107 aa, synthetic construct
  REGION 1..107: note = source = /note="Description of Artificial Sequence: Synthetic polypeptide"
DIQMTQSPSSLSASVGDRVTITCQASQDISNYLNWYQQKPGKAPKLLIYDASNLETGVPSRFSGSGSGTDFSFTISSLQPEDFATYYCQQYDILLTFGGGTKVEIKR

SEQ ID NO: 44 - protein, 107 aa, synthetic construct; identical to SEQ ID NO: 42
  REGION 1..107: note = source = /note="Description of Artificial Sequence: Synthetic polypeptide"

SEQ ID NO: 45 - protein, 107 aa, synthetic construct; identical to SEQ ID NO: 43
  REGION 1..107: note = source = /note="Description of Artificial Sequence: Synthetic polypeptide"

SEQ ID NO: 46 - protein, 107 aa, synthetic construct; identical to SEQ ID NO: 4
  REGION 1..107: note = source = /note="Description of Artificial Sequence: Synthetic polypeptide"

SEQ ID NO: 47 - protein, 107 aa, synthetic construct; identical to SEQ ID NO: 40
  REGION 1..107: note = source = /note="Description of Artificial Sequence: Synthetic polypeptide"

SEQ ID NO: 48 - protein, 107 aa, synthetic construct; identical to SEQ ID NO: 40
  REGION 1..107: note = source = /note="Description of Artificial Sequence: Synthetic polypeptide"

SEQ ID NO: 49 - protein, 108 aa, synthetic construct; identical to SEQ ID NO: 2
  REGION 1..108: note = source = /note="Description of Artificial Sequence: Synthetic polypeptide"

SEQ ID NO: 50 - protein, 108 aa, synthetic construct; identical to SEQ ID NO: 2
  REGION 1..108: note = source = /note="Description of Artificial Sequence: Synthetic polypeptide"

SEQ ID NO: 51 - protein, 108 aa, synthetic construct; identical to SEQ ID NO: 21
  REGION 1..108: note = source = /note="Description of Artificial Sequence: Synthetic polypeptide"

SEQ ID NO: 52 - protein, 108 aa, synthetic construct; identical to SEQ ID NO: 21
  REGION 1..108: note = source = /note="Description of Artificial Sequence: Synthetic polypeptide"

SEQ ID NO: 53 - protein, 108 aa, synthetic construct; identical to SEQ ID NO: 23
  REGION 1..108: note = source = /note="Description of Artificial Sequence: Synthetic polypeptide"

SEQ ID NO: 54 - protein, 108 aa, synthetic construct; identical to SEQ ID NO: 23
  REGION 1..108: note = source = /note="Description of Artificial Sequence: Synthetic polypeptide"

SEQ ID NO: 55 - protein, 108 aa, synthetic construct; identical to SEQ ID NO: 23
  REGION 1..108: note = source = /note="Description of Artificial Sequence: Synthetic polypeptide"

SEQ ID NO: 56 - protein, 107 aa, synthetic construct
  REGION 1..107: note = source = /note="Description of Artificial Sequence: Synthetic polypeptide"
DIQMTQSPSSLSASVGDRVTITCQASQDITNYLNWYQQKPGKAPKLLIYDASNLEPGVPSRFSGSGSGTDFTLTISSLQPEDFATYYCQQYDDLFTFGPGTKVDIKR

SEQ ID NO: 57 - protein, 107 aa, synthetic construct
  REGION 1..107: note = source = /note="Description of Artificial Sequence: Synthetic polypeptide"
DIQMTQSPSSLSASVGDRVTITCQASQDITNYLNWYQQKPGKAPKLLIYDASNLEPGVPSRFSGSGSGTDFTLTISSLQPEDIATYYCQQYDDLFTFGPGTKVDIKR

SEQ ID NO: 58 - protein, 107 aa, synthetic construct; identical to SEQ ID NO: 56
  REGION 1..107: note = source = /note="Description of Artificial Sequence: Synthetic polypeptide"

SEQ ID NO: 59 - protein, 107 aa, synthetic construct
  REGION 1..107: note = source = /note="Description of Artificial Sequence: Synthetic polypeptide"
DIQMTQSPSSLSASVGDRVTITCQASQDITNYLNWYQQKPGKAPKLLIYDASNLEPGVPSRFSGSGSGTDFTFTISSLQPEDFATYYCQQYDDLFTFGPGTKVDIKR

SEQ ID NO: 60 - protein, 107 aa, synthetic construct; identical to SEQ ID NO: 57
  REGION 1..107: note = source = /note="Description of Artificial Sequence: Synthetic polypeptide"

SEQ ID NO: 61 - protein, 107 aa, synthetic construct; identical to SEQ ID NO: 59
  REGION 1..107: note = source = /note="Description of Artificial Sequence: Synthetic polypeptide"

SEQ ID NO: 62 - protein, 107 aa, synthetic construct; identical to SEQ ID NO: 12
  REGION 1..107: note = source = /note="Description of Artificial Sequence: Synthetic polypeptide"

SEQ ID NO: 63 - protein, 107 aa, synthetic construct; identical to SEQ ID NO: 56
  REGION 1..107: note = source = /note="Description of Artificial Sequence: Synthetic polypeptide"

SEQ ID NO: 64 - protein, 107 aa, synthetic construct; identical to SEQ ID NO: 56
  REGION 1..107: note = source = /note="Description of Artificial Sequence: Synthetic polypeptide"

SEQ ID NO: 65 - protein, 107 aa, synthetic construct
  REGION 1..107: note = source = /note="Description of Artificial Sequence: Synthetic polypeptide"
DIQMTQSPSSLSASVGDRVTITCQASQDITNYLNWYQQKPGKAPKLLIYDASNLEPGVPSRFSGSGSGTDFTLTISSLQPEDFATYYCQQYDDLFTFGQGTKVDIKR

SEQ ID NO: 66 - protein, 107 aa, synthetic construct; identical to SEQ ID NO: 65
  REGION 1..107: note = source = /note="Description of Artificial Sequence: Synthetic polypeptide"

SEQ ID NO: 67 - protein, 108 aa, synthetic construct
  REGION 1..108: note = source = /note="Description of Artificial Sequence: Synthetic polypeptide"
EIVLTQSPGTLSLSPGERATLSCRASQIFTSTYLAWYQQKPGQAPRLLIYGASSRATGIPDRFSGSGSGTDFTLTISRLEPEDFAVYYCQQYGSSPRFGQGTRLEIKR

SEQ ID NO: 68 - protein, 108 aa, synthetic construct; identical to SEQ ID NO: 67
  REGION 1..108: note = source = /note="Description of Artificial Sequence: Synthetic polypeptide"

SEQ ID NO: 69 - protein, 108 aa, synthetic construct; identical to SEQ ID NO: 67
  REGION 1..108: note = source = /note="Description of Artificial Sequence: Synthetic polypeptide"

SEQ ID NO: 70 - protein, 108 aa, synthetic construct; identical to SEQ ID NO: 67
  REGION 1..108: note = source = /note="Description of Artificial Sequence: Synthetic polypeptide"

SEQ ID NO: 71 - protein, 108 aa, synthetic construct
  REGION 1..108: note = source = /note="Description of Artificial Sequence: Synthetic polypeptide"
EIVMTQSPATLSVSPGERATLSCRASQSVSSNLAWYQQKPGQAPRLLIYGAATRATGIPARFSGSGSGTEFTLTISSLQSEDFAVYYCQQYNNWPLTFGGGTKVEIKR

SEQ ID NO: 72 - protein, 108 aa, synthetic construct; identical to SEQ ID NO: 71
  REGION 1..108: note = source = /note="Description of Artificial Sequence: Synthetic polypeptide"

SEQ ID NO: 73 - protein, 108 aa, synthetic construct; identical to SEQ ID NO: 71
  REGION 1..108: note = source = /note="Description of Artificial Sequence: Synthetic polypeptide"

SEQ ID NO: 74 - protein, 108 aa, synthetic construct; identical to SEQ ID NO: 10
  REGION 1..108: note = source = /note="Description of Artificial Sequence: Synthetic polypeptide"

SEQ ID NO: 75 - protein, 108 aa, synthetic construct
  REGION 1..108: note = source = /note="Description of Artificial Sequence: Synthetic polypeptide"
EIVMTQSPATLSVSPGERATLSCRASQSVSSNLAWYQQKPGQAPRLLIYGAATRATGIPARFSGSGSGTEFTLTISSLEPEDFAVYYCQQYNNFPLTFGGGTKVEIKR

SEQ ID NO: 76 - protein, 108 aa, synthetic construct
  REGION 1..108: note = source = /note="Description of Artificial Sequence: Synthetic polypeptide"
EIVMTQSPATLSVSPGERATLSCRASQSVSSNLAWYQQKPGQAPRLLIYGAATRATGIPARFSGSGSGTEFTLTISSLEPEDFAVYYCQQYNNYPLTFGGGTKVEIKR

SEQ ID NO: 77 - protein, 108 aa, synthetic construct
  REGION 1..108: note = source = /note="Description of Artificial Sequence: Synthetic polypeptide"
EIVMTQSPATLSVSPGERATLSCRASQSVSSNLAWYQQKPGQAPRLLIYGAATRATGIPARFSGSGSGTEFTLTISSLEPEDFAVYYCQQYNNWPLTFGGGTKVEIKR

SEQ ID NO: 78 - protein, 108 aa, synthetic construct; identical to SEQ ID NO: 77
  REGION 1..108: note = source = /note="Description of Artificial Sequence: Synthetic polypeptide"

SEQ ID NO: 79 - protein, 109 aa, synthetic construct
  REGION 1..109: note = source = /note="Description of Artificial Sequence: Synthetic polypeptide"
EIVLTQSPGTLSLSPGERATLSCRASQSISYSYLAWYQQKPGQAPRLLIYGASSRATGIPDRFSGSGSGTDFTLTISRLEPDDFAVYYCQQYGSSPLTFGGGTKVEIKR

SEQ ID NO: 80 - protein, 109 aa, synthetic construct; identical to SEQ ID NO: 9
  REGION 1..109: note = source = /note="Description of Artificial Sequence: Synthetic polypeptide"

SEQ ID NO: 81 - protein, 109 aa, synthetic construct; identical to SEQ ID NO: 79
  REGION 1..109: note = source = /note="Description of Artificial Sequence: Synthetic polypeptide"

SEQ ID NO: 82 - protein, 109 aa, synthetic construct; identical to SEQ ID NO: 79
  REGION 1..109: note = source = /note="Description of Artificial Sequence: Synthetic polypeptide"

SEQ ID NO: 83 - protein, 109 aa, synthetic construct; identical to SEQ ID NO: 79
  REGION 1..109: note = source = /note="Description of Artificial Sequence: Synthetic polypeptide"

SEQ ID NO: 84 - protein, 109 aa, synthetic construct; identical to SEQ ID NO: 9
  REGION 1..109: note = source = /note="Description of Artificial Sequence: Synthetic polypeptide"

SEQ ID NO: 85 - protein, 109 aa, synthetic construct; identical to SEQ ID NO: 9
  REGION 1..109: note = source = /note="Description of Artificial Sequence: Synthetic polypeptide"

SEQ ID NO: 86 - protein, 114 aa, synthetic construct; identical to SEQ ID NO: 5
  REGION 1..114: note = source = /note="Description of Artificial Sequence: Synthetic polypeptide"

SEQ ID NO: 87 - protein, 114 aa, synthetic construct; identical to SEQ ID NO: 5
  REGION 1..114: note = source = /note="Description of Artificial Sequence: Synthetic polypeptide"

SEQ ID NO: 88 - protein, 114 aa, synthetic construct; identical to SEQ ID NO: 5
  REGION 1..114: note = source = /note="Description of Artificial Sequence: Synthetic polypeptide"

SEQ ID NO: 89 - protein, 114 aa, synthetic construct; identical to SEQ ID NO: 5
  REGION 1..114: note = source = /note="Description of Artificial Sequence: Synthetic polypeptide"

SEQ ID NO: 90 - protein, 114 aa, synthetic construct; identical to SEQ ID NO: 5
  REGION 1..114: note = source = /note="Description of Artificial Sequence: Synthetic polypeptide"

SEQ ID NO: 91 - protein, 114 aa, synthetic construct; identical to SEQ ID NO: 5
  REGION 1..114: note = source = /note="Description of Artificial Sequence: Synthetic polypeptide"

SEQ ID NO: 92 - protein, 114 aa, synthetic construct; identical to SEQ ID NO: 5
  REGION 1..114: note = source = /note="Description of Artificial Sequence: Synthetic polypeptide"

SEQ ID NO: 93 - protein, 114 aa, synthetic construct; identical to SEQ ID NO: 5
  REGION 1..114: note = source = /note="Description of Artificial Sequence: Synthetic polypeptide"

SEQ ID NO: 94 - protein, 114 aa, synthetic construct; identical to SEQ ID NO: 5
  REGION 1..114: note = source = /note="Description of Artificial Sequence: Synthetic polypeptide"

SEQ ID NO: 95 - protein, 114 aa, synthetic construct
  REGION 1..114: note = source = /note="Description of Artificial Sequence: Synthetic polypeptide"
DIVMTQSPDSLAVSLGERATINCKSSQSVLSSSNNKNYIAWYQQKPGQPPKLLIYWASTRESGVPDRFSGSGSGTDFTLTISSLQAEDVAVFYCQQYYSTPWTFGQGTKVEIKR

SEQ ID NO: 96 - protein, 114 aa, synthetic construct; identical to SEQ ID NO: 95
  REGION 1..114: note = source = /note="Description of Artificial Sequence: Synthetic polypeptide"

SEQ ID NO: 97 - protein, 114 aa, synthetic construct
  REGION 1..114: note = source = /note="Description of Artificial Sequence: Synthetic polypeptide"
DIVMTQSPDSLSVSLGERATINCKSSQSVLSSSNNKNYLAWYQQKPGQPPNLLIYWTSTRESGVPDRFSGSGSGTDFTLTINSLQAEDVAVYYCQQYYRTPWTFGQGTKVEIKR

SEQ ID NO: 98 - protein, 114 aa, synthetic construct; identical to SEQ ID NO: 97
  REGION 1..114: note = source = /note="Description of Artificial Sequence: Synthetic polypeptide"

SEQ ID NO: 99 - protein, 114 aa, synthetic construct; identical to SEQ ID NO: 7
  REGION 1..114: note = source = /note="Description of Artificial Sequence: Synthetic polypeptide"

SEQ ID NO: 100 - protein, 114 aa, synthetic construct; identical to SEQ ID NO: 97
  REGION 1..114: note = source = /note="Description of Artificial Sequence: Synthetic polypeptide"

SEQ ID NO: 101 - protein, 114 aa, synthetic construct; identical to SEQ ID NO: 97
  REGION 1..114: note = source = /note="Description of Artificial Sequence: Synthetic polypeptide"

SEQ ID NO: 102 - protein, 114 aa, synthetic construct; identical to SEQ ID NO: 7
  REGION 1..114: note = source = /note="Description of Artificial Sequence: Synthetic polypeptide"

SEQ ID NO: 103 - protein, 114 aa, synthetic construct; identical to SEQ ID NO: 7
  REGION 1..114: note = source = /note="Description of Artificial Sequence: Synthetic polypeptide"

SEQ ID NO: 104 - protein, 114 aa, synthetic construct
  REGION 1..114: note = source = /note="Description of Artificial Sequence: Synthetic polypeptide"
DIVMTQSPDSLAVSLGERATINCKSSQSVLSSSNNKNYLAWYQQKPGQPPKLLIYWTSTRESGVPDRFSGSGSGTDFTLTINSLQAEDVAVYYCQQYYRTPWTFGQGTKVEIKR

SEQ ID NO: 105 - protein, 114 aa, synthetic construct; identical to SEQ ID NO: 97
  REGION 1..114: note = source = /note="Description of Artificial Sequence: Synthetic polypeptide"

SEQ ID NO: 106 - protein, 114 aa, synthetic construct; identical to SEQ ID NO: 6
  REGION 1..114: note = source = /note="Description of Artificial Sequence: Synthetic polypeptide"

SEQ ID NO: 107 - protein, 114 aa, synthetic construct; identical to SEQ ID NO: 6
  REGION 1..114: note = source = /note="Description of Artificial Sequence: Synthetic polypeptide"

SEQ ID NO: 108 - protein, 114 aa, synthetic construct; identical to SEQ ID NO: 6
  REGION 1..114: note = source = /note="Description of Artificial Sequence: Synthetic polypeptide"

SEQ ID NO: 109 - protein, 114 aa, synthetic construct; identical to SEQ ID NO: 95
  REGION 1..114: note = source = /note="Description of Artificial Sequence: Synthetic polypeptide"

SEQ ID NO: 110 - protein, 114 aa, synthetic construct; identical to SEQ ID NO: 95
  REGION 1..114: note = source = /note="Description of Artificial Sequence: Synthetic polypeptide"

SEQ ID NO: 111 - protein, 114 aa, synthetic construct; identical to SEQ ID NO: 7
  REGION 1..114: note = source = /note="Description of Artificial Sequence: Synthetic polypeptide"

SEQ ID NO: 112 - protein, 114 aa, synthetic construct; identical to SEQ ID NO: 7
  REGION 1..114: note = source = /note="Description of Artificial Sequence: Synthetic polypeptide"

SEQ ID NO: 113 - protein, 114 aa, synthetic construct; identical to SEQ ID NO: 7
  REGION 1..114: note = source = /note="Description of Artificial Sequence: Synthetic polypeptide"

SEQ ID NO: 114 - protein, 114 aa, synthetic construct; identical to SEQ ID NO: 7
  REGION 1..114: note = source = /note="Description of Artificial Sequence: Synthetic polypeptide"

SEQ ID NO: 115 - protein, 114 aa, synthetic construct; identical to SEQ ID NO: 7
  REGION 1..114: note = source = /note="Description of Artificial Sequence: Synthetic polypeptide"

SEQ ID NO: 116 - protein, 114 aa, synthetic construct; identical to SEQ ID NO: 7
  REGION 1..114: note = source = /note="Description of Artificial Sequence: Synthetic polypeptide"

SEQ ID NO: 117 - protein, 114 aa, synthetic construct; identical to SEQ ID NO: 7
  REGION 1..114: note = source = /note="Description of Artificial Sequence: Synthetic polypeptide"

SEQ ID NO: 118 - protein, 114 aa, synthetic construct; identical to SEQ ID NO: 97
  REGION 1..114: note = source = /note="Description of Artificial Sequence: Synthetic polypeptide"

SEQ ID NO: 119 - protein, 114 aa, synthetic construct; identical to SEQ ID NO: 97
  REGION 1..114: note = source = /note="Description of Artificial Sequence: Synthetic polypeptide"

SEQ ID NO: 120 - protein, 114 aa, synthetic construct; identical to SEQ ID NO: 97
  REGION 1..114: note = source = /note="Description of Artificial Sequence: Synthetic polypeptide"

SEQ ID NO: 121 - protein, 114 aa, synthetic construct; identical to SEQ ID NO: 97
  REGION 1..114: note = source = /note="Description of Artificial Sequence: Synthetic polypeptide"

SEQ ID NO: 122 - protein, 114 aa, synthetic construct
  REGION 1..114: note = source = /note="Description of Artificial Sequence: Synthetic polypeptide"
DIVMTQSPDSLAVSLGERATINCKSSQSVLSSSNNKNYLAWYQQKPGQPPKLLIYWTSTRDSGVPDRFSGSGSGTDFTLTINSLQAEDVAVYYCQQYYRTPWTFGQGTKVEIKR

SEQ ID NO: 123 - protein, 114 aa, synthetic construct; identical to SEQ ID NO: 104
  REGION 1..114: note = source = /note="Description of Artificial Sequence: Synthetic polypeptide"

SEQ ID NO: 124 - protein, 111 aa, synthetic construct
  REGION 1..111: note = source = /note="Description of Artificial Sequence: Synthetic polypeptide"
QSVLTQPPSASGTPGQRVTISCSGSSSNIGSQTVNWYQHLPGTAPKLLIYTNNQRPSGVPDRFSGSKSGTSASLAISGLQSEDEADYFCATFDESLSGPVFGGGTKLTVLG

SEQ ID NO: 125 - protein, 111 aa, synthetic construct
  REGION 1..111: note = source = /note="Description of Artificial Sequence: Synthetic polypeptide"
QSVLTQPPSASGTPGQRVTISCSGSSSNIGSQTVNWYQHLPGTAPKLLIYTNNQRPSGVPDRFSGSKSGTSASLAISGLQSEDEADYFCATFDESLQGPVFGGGTKLTVLG

SEQ ID NO: 126 - protein, 111 aa, synthetic construct
  REGION 1..111: note = source = /note="Description of Artificial Sequence: Synthetic polypeptide"
QSVLTQPPSASGTPGQRVTISCSGSSSNIGSNYVNWYQHLPGTAPKLLIYTNNQRPSGVPDRFSGSKSGTSASLAISGLQSEDEADYFCATFDESLSGPVFGGGTKLTVLG

SEQ ID NO: 127 - protein, 111 aa, synthetic construct
  REGION 1..111: note = source = /note="Description of Artificial Sequence: Synthetic polypeptide"
QSVLTQPPSASGTPGQRVTISCSGSSSNIGSNYVNWYQHLPGTAPKLLIYTNNQRPSGVPDRFSGSKSGTSASLAISGLQSEDEADYFCATFDESLQGPVFGGGTKLTVLG

SEQ ID NO: 128 - protein, 111 aa, synthetic construct
  REGION 1..111: note = source = /note="Description of Artificial Sequence: Synthetic polypeptide"
QSVLTQPPSASGTPGQRVTISCSGSSSNIGSQTVNWYQHLPGTAPKLLIYTNNQRPSGVPDRFSGSKSGTSASLAISGLQSEDEADYFCATFDDSLNGPVFGGGTKLTVLG

SEQ ID NO: 129 - protein, 111 aa, synthetic construct
  REGION 1..111: note = source = /note="Description of Artificial Sequence: Synthetic polypeptide"
QSVLTQPPSASGTPGQRVTISCSGSSSNIGSNYVNWYQHLPGTAPKLLIYTNNQRPSGVPDRFSGSKSGTSASLAISGLQSEDEADYFCATFDDSLNGPVFGGGTKLTVLG

SEQ ID NO: 130 - protein, 111 aa, synthetic construct
  REGION 1..111: note = source = /note="Description of Artificial Sequence: Synthetic polypeptide"
QSVLTQPPSASGTPGQRVTISCSGSSSNIGSNTVNWYQHLPGTAPKLLIYTNNQRPSGVPDRFSGSKSGTSASLAISGLQSEDEADYFCATFDESLNGPVFGGGTKLTVLG

SEQ ID NO: 131 - protein, 111 aa, synthetic construct
  REGION 1..111: note = source = /note="Description of Artificial Sequence: Synthetic polypeptide"
QSVLTQPPSASGTPGQRVTISCSGSSSNIGSNTVNWYQHLPGTAPKLLIYTNNQRPSGVPDRFSGSKSGTSASLAISGLQSEDEADYFCATFDDSLQGPVFGGGTKLTVLG

SEQ ID NO: 132 - protein, 111 aa, synthetic construct
  REGION 1..111: note = source = /note="Description of Artificial Sequence: Synthetic polypeptide"
QSVLTQPPSASGTPGQRVTISCSGSSSNIGSNTVNWYQHLPGTAPKLLIYTNNQRPSGVPDRFSGSKSGTSASLAISGLQSEDEADYFCATFDDSLSGPVFGGGTKLTVLG

SEQ ID NO: 133 - protein, 111 aa, synthetic construct
  REGION 1..111: note = source = /note="Description of Artificial Sequence: Synthetic polypeptide"
QSVLTQPPSASGTPGQRVTISCSGSSSNIGSNTVNWYQHLPGTAPKLLIYTNNQRPSGVPDRFSGSKSGTSASLAISGLQSEDEADYFCATFDDSLNAPVFGGGTKLTVLG

SEQ ID NO: 134 - protein, 111 aa, synthetic construct
  REGION 1..111: note = source = /note="Description of Artificial Sequence: Synthetic polypeptide"
QSVLTQPPSASGTPGQRVTISCSGSSSNIGSNTVNWYQHLPGTAPKLLIYTNNQRPSGVPDRFSGSKSGTSASLAISGLQSEDEADYFCATFDSSLNGPVFGGGTKLTVLG

SEQ ID NO: 135 - protein, 111 aa, synthetic construct
  REGION 1..111: note = source = /note="Description of Artificial Sequence: Synthetic polypeptide"
QSVLTQPPSASGTPGQRVTISCSGSSSNIGSNYVNWYQHLPGTAPKLLIYTNNQRPSGVPDRFSGSKSGTSASLAISGLQSEDEADYFCATFDSSLNAPVFGGGTKLTVLG

SEQ ID NO: 136 - protein, 111 aa, synthetic construct; identical to SEQ ID NO: 135
  REGION 1..111: note = source = /note="Description of Artificial Sequence: Synthetic polypeptide"

SEQ ID NO: 137 - protein, 111 aa, synthetic construct; identical to SEQ ID NO: 124
  REGION 1..111: note = source = /note="Description of Artificial Sequence: Synthetic polypeptide"

SEQ ID NO: 138 - protein, 108 aa, synthetic construct
  REGION 1..108: note = source = /note="Description of Artificial Sequence: Synthetic polypeptide"
DIQMTQSPSSLSASIGDRVTITCRASQDLRNYLGWYQQKPGKAPKRLIYGASSLQSGVPSRFSGSGSGTEFTLTISSLQPEDFATYYCLQHNNYPFTFGQGTKVDIKR

SEQ ID NO: 139 - protein, 108 aa, synthetic construct; identical to SEQ ID NO: 22
  REGION 1..108: note = source = /note="Description of Artificial Sequence: Synthetic polypeptide"

SEQ ID NO: 140 - protein, 111 aa, synthetic construct
  REGION 1..111: note = source = /note="Description of Artificial Sequence: Synthetic polypeptide"
QSVLTQPPSASGTPGQRVTISCSGSSSNIGSNTVNWYQQLPGTAPKLLIYTNNQRPSGVPDRFSGSKSGTSASLAISGLQSEDEADYFCATFDSSLSGPVFGGGTKLTVLG

SEQ ID NO: 141 - protein, 108 aa, synthetic construct
  REGION 1..108: note = source = /note="Description of Artificial Sequence: Synthetic polypeptide"
DIQLTQSPSSLSASVGDRVTITCRASQTISRFLNWYQQKPGKAPELLIYVASSLQSGVPSRFSGSGSGTDFTLTISSLQPEDFATYYCQQSYSTLISFGQGTKLEITR

SEQ ID NO: 142 - protein, 111 aa, synthetic construct
  REGION 1..111: note = source = /note="Description of Artificial Sequence: Synthetic polypeptide"
QSVLTQPPSVSAAPGQKVTISCSGSSSNIGNNYVSWYEQFPGTAPKLLIYDNNKRPSGIPDRFSGSKSGTSATLGITGLQTGDEADYYCGTWDSSLSAVVFGGGTKLTVLG

SEQ ID NO: 143 - protein, 108 aa, synthetic construct
  REGION 1..108: note = source = /note="Description of Artificial Sequence: Synthetic polypeptide"
DIQLTQSPSSLSASVGDRVTITCRASQTISRFLNWYQQKPGKAPELLIYVASSLQSGVPSRFSGSGSGTDFTLTISSLQPEDFATYYCQQSYSTLISFGQGTKLEIKR

SEQ ID NO: 144 - protein, 108 aa, synthetic construct; identical to SEQ ID NO: 143
  REGION 1..108: note = source = /note="Description of Artificial Sequence: Synthetic polypeptide"

SEQ ID NO: 145 - protein, 108 aa, synthetic construct; identical to SEQ ID NO: 141
  REGION 1..108: note = source = /note="Description of Artificial Sequence: Synthetic polypeptide"

SEQ ID NO: 146 - protein, 108 aa, synthetic construct
  REGION 1..108: note = source = /note="Description of Artificial Sequence: Synthetic polypeptide"
DIQLTQSPSSLSASVGDRVTITCRASQTISRFLNWYQQKPGKAPKLLIYVASSLQSGVPSRFSGSGSGTDFTLTISSLQPEDFATYYCQQSYSTLISFGQGTKLEIKR

SEQ ID NO: 147 - protein, 108 aa, synthetic construct; identical to SEQ ID NO: 143
  REGION 1..108: note = source = /note="Description of Artificial Sequence: Synthetic polypeptide"

SEQ ID NO: 148 - protein, 108 aa, synthetic construct; identical to SEQ ID NO: 143
  REGION 1..108: note = source = /note="Description of Artificial Sequence: Synthetic polypeptide"

SEQ ID NO: 149 - protein, 111 aa, synthetic construct
  REGION 1..111: note = source = /note="Description of Artificial Sequence: Synthetic polypeptide"
QSVLTQPPSVSAAPGQKVTISCSGSSSNIGNNYVSWYQQLPGTAPKLLIYDNNKRPSGIPDRFSGSKSGTSATLGITGLQTGDEADYYCGTWDSSLSAVVFGGGTKLTVLG

SEQ ID NO: 150 - protein, 111 aa, synthetic construct; identical to SEQ ID NO: 149
  REGION 1..111: note = source = /note="Description of Artificial Sequence: Synthetic polypeptide"

SEQ ID NO: 151 - protein, 111 aa, synthetic construct; identical to SEQ ID NO: 142
  REGION 1..111: note = source = /note="Description of Artificial Sequence: Synthetic polypeptide"

SEQ ID NO: 152 - protein, 111 aa, synthetic construct
  REGION 1..111: note = source = /note="Description of Artificial Sequence: Synthetic polypeptide"
QSVLTQPPSVSAAPGQKVTISCSGSSSNIGNNYVSWYQQLPGTAPKLLIYDNNKRPSGIPDRFSGSKSGTSATLAITGLQTGDEADYYCGTFESSLSAVVFGGGTKLTVLG

SEQ ID NO: 153 - protein, 111 aa, synthetic construct
  REGION 1..111: note = source = /note="Description of Artificial Sequence: Synthetic polypeptide"
QSVLTQPPSVSAAPGQKVTISCSGSSSNIGNNYVSWYQQLPGTAPKLLIYDNNKRPSGIPDRFSGSKSGTSATLAITGLQTGDEADYYCGTWDSSLSAVVFGGGTKLTVLG

SEQ ID NO: 154 - protein, 111 aa, synthetic construct; identical to SEQ ID NO: 153
  REGION 1..111: note = source = /note="Description of Artificial Sequence: Synthetic polypeptide"

SEQ ID NO: 155 - protein, 111 aa, synthetic construct; identical to SEQ ID NO: 149
  REGION 1..111: note = source = /note="Description of Artificial Sequence: Synthetic polypeptide"

SEQ ID NO: 156 - protein, 111 aa, synthetic construct; identical to SEQ ID NO: 152
  REGION 1..111: note = source = /note="Description of Artificial Sequence: Synthetic polypeptide"

SEQ ID NO: 157 - protein, 108 aa, synthetic construct
  REGION 1..108: note = source = /note="Description of Artificial Sequence: Synthetic polypeptide"
DIQLTQSPSSLSASVGDRVTITCRASQTISRFLNWYQQKPGKAPKLLIYVASSLQSGVPSRFSGSGSGTDFTLTISSLQPEDFATYYCQQSYSTLLSFGQGTKLEIKR

SEQ ID NO: 158 - protein, 128 aa, synthetic construct
  REGION 1..128: note = source = /note="Description of Artificial Sequence: Synthetic polypeptide"
QMQVVQSGAEVKKPGASVKVSCKASGYTFTGYYMHWVRQAPGQGLEWMGWINPNSGGTNYAQKFQGRVTMTRDTSISTAYMELSRLRSDDTAVYYCARGGDYVWGTYRPHYYYGMDVWGQGTTVTVSS

SEQ ID NO: 159 - protein, 121 aa, synthetic construct
  REGION 1..121: note = source = /note="Description of Artificial Sequence: Synthetic polypeptide"
QVQLVESGGGVVQPGRSLRLSCAASGFTFSNFGMHWVRQAPGKGLEWVAVIWYDGSNENYADSVKGRFTISRDNSKNTLYLHMNSLRVADTAVYYCARDGTIFGVVLGDYWGQGTLVTVSS

SEQ ID NO: 160 - protein, 121 aa, synthetic construct
  REGION 1..121: note = source = /note="Description of Artificial Sequence: Synthetic polypeptide"
QVQLVESGGGVVQPGRSLRLSCAASGFTFSYFGMHWVRQAPGKGLEWVAVIWYDGSNKYYADSVKGRFTISRDNSKNTLYLQMNSLRAEDTAVYYCARDGTIFGVLLGDYWGQGTLVTVSS

SEQ ID NO: 161 - protein, 120 aa, synthetic construct
  REGION 1..120: note = source = /note="Description of Artificial Sequence: Synthetic polypeptide"
QVQLVESGGGVVQPGRSLRLSCAASGFTFSSYGMHWVRQAPGKGLEWVAVIWYDGSNKYYADSVKGRFTISSDNSKNTLYLQMNSLRAEDTAVYYCARDRTIFGVVLDYWGQGTLVTVSS

SEQ ID NO: 162 - protein, 123 aa, synthetic construct
  REGION 1..123: note = source = /note="Description of Artificial Sequence: Synthetic polypeptide"
QVPLVQSGAEVKKPGASVKVSCKASGYTFTGYYIHWVRQAPGQGLEWMGWINPDSGGTDYSQRFQGRFTMTRDTSISTAYMELNRLRSDDTAVYYCAREATIFGMVIVPFDYWGQGTLVTVSS

SEQ ID NO: 163 - protein, 123 aa, synthetic construct
  REGION 1..123: note = source = /note="Description of Artificial Sequence: Synthetic polypeptide"
QVPLVQSGAEVKKPGASVKVSCKASGYTFTGYYIHWVRQAPGQGLEWMGWINPDSGGTDYSQRFQGRFTMTRDTSISTAYMELSRLRSDDTAVYYCAREATIFGMVIVPFDYWGQGTLVTVSS

SEQ ID NO: 164 - protein, 123 aa, synthetic construct
  REGION 1..123: note = source = /note="Description of Artificial Sequence: Synthetic polypeptide"
QVPLVQSGAEVKKPGASVKVSCKASGYTFTGYYIHWVRQAPGQGLVWMGWISPNSGDTSYAQKFQDRVTMTRDTSISTAYMELSRLRSDDTAVYFCTREATIFGMLIVPFDYWGQGTLVTVSS

SEQ ID NO: 165 - protein, 123 aa, synthetic construct
  REGION 1..123: note = source = /note="Description of Artificial Sequence: Synthetic polypeptide"
QVPLVQSGAEVKKPGASVKVSCKASGYTFTGYYIHWVRQAPGQGLEWMGWISPNNGDTNYAQKFQDRVTMTRDTSISTAYMELSRLRSDDTAVYYCTREATIFGMLIVPFDYWGQGTLVTVSS

SEQ ID NO: 166 - protein, 126 aa, synthetic construct
  REGION 1..126: note = source = /note="Description of Artificial Sequence: Synthetic polypeptide"
QVQLQESGPGLVKPSQTLSLTCTVSGDSISSGGYYWSWIRQHPGKGLEWIGYIYYSGSTYYNPSLKSRVTISVDTSKNQFSLKLSSVTAADTAVYYCARDRITIFGVVMGGGMDVWGQGTTVTVSS

SEQ ID NO: 167 - protein, 120 aa, synthetic construct
  REGION 1..120: note = source = /note="Description of Artificial Sequence: Synthetic polypeptide"
QVQLVESGGGVVQPGRSLRLSCAASGFTFSNYGMHWVRQAPGEGLEWVAAIWFDGSDKYYADSVKGRFTISRDNSKNTLYLQMNSLRAEDTAVYYCARDQAIFGVVPDYWGQGTLVTVSS

SEQ ID NO: 168 - protein, 121 aa, synthetic construct; identical to SEQ ID NO: 160
  REGION 1..121: note = source = /note="Description of Artificial Sequence: Synthetic polypeptide"

SEQ ID NO: 169 - protein, 120 aa, synthetic construct
  REGION 1..120: note = source = /note="Description of Artificial Sequence: Synthetic polypeptide"
QVQLVESGGGVVQPGRSLRLSCAASGFSFSSYGMHWVRQPPGKGLEWVAAIWYDGNNKYYADSVKGRFTISRDSSKNTLYLQMNSLRAEDTAVYYCARDRTIFGVVLEYLGQGTLVTVSS

SEQ ID NO: 170 - protein, 117 aa, synthetic construct
  REGION 1..117: note = source = /note="Description of Artificial Sequence: Synthetic polypeptide"
QVQLQESGPGLVKPSETLSLTCTVSQGSISSYYWSWIRQPAGKGLEWIGRIYTSGSTNYNPSLKSRVTMSIDTSKNQFSLKLNSVTAADTAVYYCARDVAVAGFDYWGQGTLVTVSS

SEQ ID NO: 171 - protein, 117 aa, synthetic construct
  REGION 1..117: note = source = /note="Description of Artificial Sequence: Synthetic polypeptide"
QVQLQESGPGLVKPSETLSLTCTVSGGSISSYYWSWIRQPAGKGLEWIGRIYTSGSTNYNPSLKSRVTMSIDTSKNQFSLKLNSVTAADTAVYYCARDVAVAGFDYWGQGTLVTVSS

SEQ ID NO: 172 - protein, 121 aa, synthetic construct
  REGION 1..121: note = source = /note="Description of Artificial Sequence: Synthetic polypeptide"
QVQLVESGGGVVQPGRSLRLSCAASGFTFSYFGMHWVRQAPGKGLEWVAVIWYDASNKYYADAVKGRFTISRDNSKNTLYLQMNSLRAEDTAVYYCARDGTIFGVLLGDYWGQGTLVTVSS

SEQ ID NO: 173 - protein, 121 aa, synthetic construct
  REGION 1..121: note = source = /note="Description of Artificial Sequence: Synthetic polypeptide"
QVQLVESGGGVVQPGRSLRLSCAASGFTFSYFGMHWVRQAPGKGLEWVAVIWYDASNKYYADSVKGRFTISRDNSKNTLYLQMNSLRAEDTAVYYCARDGTIFGVLLGDYWGQGTLVTVSS

SEQ ID NO: 174 - protein, 121 aa, synthetic construct
  REGION 1..121: note = source = /note="Description of Artificial Sequence: Synthetic polypeptide"
QVQLVESGGGVVQPGRSLRLSCAASGFTFSYFGMHWVRQAPGKGLEWVAVIWYDGSNKYYADAVKGRFTISRDNSKNTLYLQMNSLRAEDTAVYYCARDGTIFGVLLGDYWGQGTLVTVSS

SEQ ID NO: 175 - protein, 121 aa, synthetic construct; identical to SEQ ID NO: 172
  REGION 1..121: note = source = /note="Description of Artificial Sequence: Synthetic polypeptide"

SEQ ID NO: 176 - protein, 121 aa, synthetic construct; identical to SEQ ID NO: 172
  REGION 1..121: note = source = /note="Description of Artificial Sequence: Synthetic polypeptide"

SEQ ID NO: 177 - protein, 121 aa, synthetic construct
  REGION 1..121: note = source = /note="Description of Artificial Sequence: Synthetic polypeptide"
QVQLVESGGGVVQPGRSLRLSCAASGFTFSYFGMHWVRQAPGKGLEWVAVIWYDASNKYYADAVKGRFTISRDNSKNTLYLQMNSLRAEDTAVYYCARDRTIFGVLLGDYWGQGTLVTVSS

SEQ ID NO: 178 - protein, 121 aa, synthetic construct
  REGION 1..121: note = source = /note="Description of Artificial Sequence: Synthetic polypeptide"
QVQLVESGGGVVQPGRSLRLSCAASGFTFSNFGMHWVRQAPGKGLEWVAVIWYDASNENYADAVKGRFTISRDNSKNTLYLQMNSLRVADTAVYYCARDGTIFGVVLGDYWGQGTLVTVSS

SEQ ID NO: 179 - protein, 121 aa, synthetic construct; identical to SEQ ID NO: 178
  REGION 1..121: note = source = /note="Description of Artificial Sequence: Synthetic polypeptide"

SEQ ID NO: 180 - protein, 121 aa, synthetic construct; identical to SEQ ID NO: 178
  REGION 1..121: note = source = /note="Description of Artificial Sequence: Synthetic polypeptide"

SEQ ID NO: 181 - protein, 121 aa, synthetic construct
  REGION 1..121: note = source = /note="Description of Artificial Sequence: Synthetic polypeptide"
QVQLVESGGGVVQPGRSLRLSCAASGFTFSNFGMHWVRQAPGKGLEWVAVIWYDASNENYADSVKGRFTISRDNSKNTLYLHMNSLRVADTAVYYCARDGTIFGVVLGDYWGQGTLVTVSS

SEQ ID NO: 182 - protein, 121 aa, synthetic construct
  REGION 1..121: note = source = /note="Description of Artificial Sequence: Synthetic polypeptide"
QVQLVESGGGVVQPGRSLRLSCAASGFTFSNFGMHWVRQAPGKGLEWVAVIWYDGSNENYADAVKGRFTISRDNSKNTLYLHMNSLRVADTAVYYCARDGTIFGVVLGDYWGQGTLVTVSS

SEQ ID NO: 183 - protein, 121 aa, synthetic construct
  REGION 1..121: note = source = /note="Description of Artificial Sequence: Synthetic polypeptide"
QVQLVESGGGVVQPGRSLRLSCAASGFTFSNFGMHWVRQAPGKGLEWVAVIWYDASNENYADAVKGRFTISRDNSKNTLYLQMNSLRVEDTAVYYCARDRTIFGVVLGDYWGQGTLVTVSS

SEQ ID NO: 184 - protein, 121 aa, synthetic construct
  REGION 1..121: note = source = /note="Description of Artificial Sequence: Synthetic polypeptide"
QVQLVESGGGVVQPGRSLRLSCAASGFTFSNFGMHWVRQAPGKGLEWVAVIWYDASNENYADAVKGRFTISRDNSKNTLYLQMNSLRVEDTAVYYCARDGTIFGVVLGDYWGQGTLVTVSS

SEQ ID NO: 185 - protein, 121 aa, synthetic construct
  REGION 1..121: note = source = /note="Description of Artificial Sequence: Synthetic polypeptide"
QVQLVESGGGVVQPGRSLRLSCAASGFTFSNFGMHWVRQAPGKGLEWVAVIWYDGSNENYADSVKGRFTISRDNSKNTLYLHMNSLRAADTAVYYCARDGTIFGVVLGDYWGQGTLVTVSS

SEQ ID NO: 186 - protein, 121 aa, synthetic construct
  REGION 1..121: note = source = /note="Description of Artificial Sequence: Synthetic polypeptide"
QVQLVESGGGVVQPGRSLRLSCAASGFTFSNFGMHWVRQAPGKGLEWVAVIWYDASNENYADAVKGRFTISRDNSKNTLYLQMNSLRAADTAVYYCARDGTIFGVVLGDYWGQGTLVTVSS

SEQ ID NO: 187 - protein, 121 aa, synthetic construct
  REGION 1..121: note = source = /note="Description of Artificial Sequence: Synthetic polypeptide"
QVQLVESGGGVVQPGRSLRLSCAASGFTFSNFGMHWVRQAPGKGLEWVAVIWYDASNENYADAVKGRFTISRDNSKNTLYLHMNSLRAADTAVYYCARDGTIFGVVLGDYWGQGTLVTVSS

SEQ ID NO: 188 - protein, 121 aa, synthetic construct; identical to SEQ ID NO: 186
  REGION 1..121: note = source = /note="Description of Artificial Sequence: Synthetic polypeptide"

SEQ ID NO: 189 - protein, 121 aa, synthetic construct; identical to SEQ ID NO: 186
  REGION 1..121: note = source = /note="Description of Artificial Sequence: Synthetic polypeptide"

SEQ ID NO: 190 - protein, 121 aa, synthetic construct; identical to SEQ ID NO: 187
  REGION 1..121: note = source = /note="Description of Artificial Sequence: Synthetic polypeptide"

SEQ ID NO: 191 - protein, 121 aa, synthetic construct; identical to SEQ ID NO: 187
  REGION 1..121: note = source = /note="Description of Artificial Sequence: Synthetic polypeptide"

SEQ ID NO: 192 - protein, 121 aa, synthetic construct; identical to SEQ ID NO: 186
  REGION 1..121: note = source = /note="Description of Artificial Sequence: Synthetic polypeptide"

SEQ ID NO: 193 - protein, 121 aa, synthetic construct
  REGION 1..121: note = source = /note="Description of Artificial Sequence: Synthetic polypeptide"
QVQLVESGGGVVQPGRSLRLSCAASGFTFSNFGMHWVRQAPGKGLEWVAVIWYDGSNENYADAVKGRFTISRDNSKNTLYLQMNSLRAADTAVYYCARDGTIFGVVLGDYWGQGTLVTVSS

SEQ ID NO: 194 - protein, 121 aa, synthetic construct
  REGION 1..121: note = source = /note="Description of Artificial Sequence: Synthetic polypeptide"
QVQLVESGGGVVQPGRSLRLSCAASGFTFSNFGMHWVRQAPGKGLEWVAVIWYDASNENYADSVKGRFTISRDNSKNTLYLQMNSLRAADTAVYYCARDGTIFGVVLGDYWGQGTLVTVSS

SEQ ID NO: 195 - protein, 121 aa, synthetic construct
  REGION 1..121: note = source = /note="Description of Artificial Sequence: Synthetic polypeptide"
QVQLVESGGGVVQPGRSLRLSCAASGFTFSNFGMHWVRQAPGKGLEWVAVIWYDASNENYADAVKGRFTISRDNSKNTLYLQMNSLRAEDTAVYYCARDRTIFGVVLGDYWGQGTLVTVSS

SEQ ID NO: 196 - protein, 121 aa, synthetic construct
  REGION 1..121: note = source = /note="Description of Artificial Sequence: Synthetic polypeptide"
QVQLVESGGGVVQPGRSLRLSCAASGFTFSNFGMHWVRQAPGKGLEWVAVIWYDASNENYADAVKGRFTISRDNSKNTLYLQMNSLRAEDTAVYYCARDGTIFGVVLGDYWGQGTLVTVSS

SEQ ID NO: 197 - protein, 120 aa, synthetic construct
  REGION 1..120: note = source = /note="Description of Artificial Sequence: Synthetic polypeptide"
QVQLVESGGGVVQPGRSLRLSCAASGFTFSSYGMHWVRQAPGKGLEWVAVIWYDASNKYYADAVKGRFTISRDNSKNTLYLQMNSLRAEDTAVYYCARDRTIFGVVLDYWGQGTLVTVSS

SEQ ID NO: 198 - protein, 120 aa, synthetic construct
  REGION 1..120: note = source = /note="Description of Artificial Sequence: Synthetic polypeptide"
QVQLVESGGGVVQPGRSLRLSCAASGFTFSSYGMHWVRQAPGKGLEWVAVIWYDASNKYYADAVKGRFTISSDNSKNTLYLQMNSLRAEDTAVYYCARDRTIFGVVLDYWGQGTLVTVSS

SEQ ID NO: 199 - protein, 120 aa, synthetic construct; identical to SEQ ID NO: 197
  REGION 1..120: note = source = /note="Description of Artificial Sequence: Synthetic polypeptide"

SEQ ID NO: 200 - protein, 120 aa, synthetic construct; identical to SEQ ID NO: 197
  REGION 1..120: note = source = /note="Description of Artificial Sequence: Synthetic polypeptide"

SEQ ID NO: 201 - protein, 120 aa, synthetic construct; identical to SEQ ID NO: 198
  REGION 1..120: note = source = /note="Description of Artificial Sequence: Synthetic polypeptide"

SEQ ID NO: 202 - protein, 120 aa, synthetic construct; identical to SEQ ID NO: 198
  REGION 1..120: note = source = /note="Description of Artificial Sequence: Synthetic polypeptide"

SEQ ID NO: 203 - protein, 120 aa, synthetic construct; identical to SEQ ID NO: 197
  REGION 1..120: note = source = /note="Description of Artificial Sequence: Synthetic polypeptide"

SEQ ID NO: 204 - protein, 120 aa, synthetic construct
  REGION 1..120: note = source = /note="Description of Artificial Sequence: Synthetic polypeptide"
QVQLVESGGGVVQPGRSLRLSCAASGFTFSSYGMHWVRQAPGKGLEWVAVIWYDASNKYYADSVKGRFTISRDNSKNTLYLQMNSLRAEDTAVYYCARDRTIFGVVLDYWGQGTLVTVSS

SEQ ID NO: 205 - protein, 120 aa, synthetic construct
  REGION 1..120: note = source = /note="Description of Artificial Sequence: Synthetic polypeptide"
QVQLVESGGGVVQPGRSLRLSCAASGFTFSSYGMHWVRQAPGKGLEWVAVIWYDGSNKYYADAVKGRFTISRDNSKNTLYLQMNSLRAEDTAVYYCARDRTIFGVVLDYWGQGTLVTVSS

SEQ ID NO: 206 - protein, 121 aa, synthetic construct; identical to SEQ ID NO: 172
  REGION 1..121: note = source = /note="Description of Artificial Sequence: Synthetic polypeptide"

SEQ ID NO: 207 - protein, 121 aa, synthetic construct; identical to SEQ ID NO: 177
  REGION 1..121: note = source = /note="Description of Artificial Sequence: Synthetic polypeptide"

SEQ ID NO: 208 - protein, 121 aa, synthetic construct; identical to SEQ ID NO: 172
  REGION 1..121: note = source = /note="Description of Artificial Sequence: Synthetic polypeptide"

SEQ ID NO: 209 - protein, 121 aa, synthetic construct; identical to SEQ ID NO: 177
  REGION 1..121: note = source = /note="Description of Artificial Sequence: Synthetic polypeptide"

SEQ ID NO: 210 - protein, 121 aa, synthetic construct; identical to SEQ ID NO: 160
  REGION 1..121: note = source = /note="Description of Artificial Sequence: Synthetic polypeptide"

SEQ ID NO: 211 - protein, 121 aa, synthetic construct; identical to SEQ ID NO: 173
  REGION 1..121: note = source = /note="Description of Artificial Sequence: Synthetic polypeptide"

SEQ ID NO: 212 - protein, 121 aa, synthetic construct; identical to SEQ ID NO: 174
  REGION 1..121: note = source = /note="Description of Artificial Sequence: Synthetic polypeptide"

SEQ ID NO: 213 - protein, 120 aa, synthetic construct
  REGION 1..120: note = source = /note="Description of Artificial Sequence: Synthetic polypeptide"
QVQLVESGGGVVQPGRSLRLSCAASGFSFSSYGMHWVRQPPGKGLEWVAAIWYDANNKYYADAVKGRFTISRDSSKNTLYLQMNSLRAEDTAVYYCARDRTIFGVVLEYWGQGTLVTVSS

SEQ ID NO: 214 - protein, 120 aa, synthetic construct; identical to SEQ ID NO: 213
  REGION 1..120: note = source = /note="Description of Artificial Sequence: Synthetic polypeptide"

SEQ ID NO: 215 - protein, 120 aa, synthetic construct
  REGION 1..120: note = source = /note="Description of Artificial Sequence: Synthetic polypeptide"
QVQLVESGGGVVQPGRSLRLSCAASGFSFSSYGMHWVRQPPGKGLEWVAAIWYDANNKYYADAVKGRFTISRDSSKNTLYLQMNSLRAEDTAVYYCARDRTIFGVVLEYLGQGTLVTVSS

SEQ ID NO: 216 - protein, 120 aa, synthetic construct; identical to SEQ ID NO: 213
  REGION 1..120: note = source = /note="Description of Artificial Sequence: Synthetic polypeptide"

SEQ ID NO: 217 - protein, 120 aa, synthetic construct; identical to SEQ ID NO: 215
  REGION 1..120: note = source = /note="Description of Artificial Sequence: Synthetic polypeptide"

SEQ ID NO: 218 - protein, 120 aa, synthetic construct; identical to SEQ ID NO: 215
  REGION 1..120: note = source = /note="Description of Artificial Sequence: Synthetic polypeptide"

SEQ ID NO: 219 - protein, 120 aa, synthetic construct; identical to SEQ ID NO: 213
  REGION 1..120: note = source = /note="Description of Artificial Sequence: Synthetic polypeptide"

SEQ ID NO: 220 - protein, 120 aa, synthetic construct
  REGION 1..120: note = source = /note="Description of Artificial Sequence: Synthetic polypeptide"
QVQLVESGGGVVQPGRSLRLSCAASGFSFSSYGMHWVRQPPGKGLEWVAAIWYDGNNKYYADAVKGRFTISRDSSKNTLYLQMNSLRAEDTAVYYCARDRTIFGVVLEYWGQGTLVTVSS

SEQ ID NO: 221 - protein, 120 aa, synthetic construct
  REGION 1..120: note = source = /note="Description of Artificial Sequence: Synthetic polypeptide"
QVQLVESGGGVVQPGRSLRLSCAASGFSFSSYGMHWVRQPPGKGLEWVAAIWYDANNKYYADSVKGRFTISRDSSKNTLYLQMNSLRAEDTAVYYCARDRTIFGVVLEYWGQGTLVTVSS

SEQ ID NO: 222 - protein, 120 aa, synthetic construct; identical to SEQ ID NO: 213
  REGION 1..120: note = source = /note="Description of Artificial Sequence: Synthetic polypeptide"

SEQ ID NO: 223 - protein, 120 aa, synthetic construct; identical to SEQ ID NO: 215
  REGION 1..120: note = source = /note="Description of Artificial Sequence: Synthetic polypeptide"

SEQ ID NO: 224 - protein, 120 aa, synthetic construct
  REGION 1..120: note = source = /note="Description of Artificial Sequence: Synthetic polypeptide"
QVQLVESGGGVVQPGRSLRLSCAASGFSFSSYGMHWVRQAPGKGLEWVAVIWYDASNKYYEDAVKGRFTISRDNSKNTLFLQVNSLRAEDTAVYYCARGITIFGHGFEYWGQGTLVTVSS

SEQ ID NO: 225 - protein, 120 aa, synthetic construct
  REGION 1..120: note = source = /note="Description of Artificial Sequence: Synthetic polypeptide"
QVQLVESGGGVVQPGRSLRLSCAASGFSFSSYGMHWVRQAPGKGLEWVAVIWYDGSNKYYEDSVKGRFTISRDNSKNTLFLQVNSLRAEDTAVYYCARGITIFGHGFEYWGQGTLVTVSS

SEQ ID NO: 226 - protein, 120 aa, synthetic construct
  REGION 1..120: note = source = /note="Description of Artificial Sequence: Synthetic polypeptide"
QVQLVESGGGVVQPGRSLRLSCAASGFSFSSYGMHWVRQAPGKGLEWVAVIWYDGSNKYYEDAVKGRFTISRDNSKNTLFLQVNSLRAEDTAVYYCARGITIFGHGFEYWGQGTLVTVSS

SEQ ID NO: 227 - protein, 120 aa, synthetic construct
  REGION 1..120: note = source = /note="Description of Artificial Sequence: Synthetic polypeptide"
QVQLVESGGGVVQPGRSLRLSCAASGFSFSSYGMHWVRQAPGKGLEWVAVIWYDASNKYYEDSVKGRFTISRDNSKNTLFLQVNSLRAEDTAVYYCARGITIFGHGFEYWGQGTLVTVSS

SEQ ID NO: 228 - protein, 120 aa, synthetic construct
  REGION 1..120: note = source = /note="Description of Artificial Sequence: Synthetic polypeptide"
QVQLVESGGGVVQPGRSLRLSCAASGFTFSNYGMHWVRQAPGEGLEWVAAIWFDASDKYYADAVKGRFTISRDNSKNTLYLQMNSLRAEDTAVYYCARDQAIFGVVPDYWGQGTLVTVSS

SEQ ID NO: 229 - protein, 120 aa, synthetic construct
  REGION 1..120: note = source = /note="Description of Artificial Sequence: Synthetic polypeptide"
QVQLVESGGGVVQPGRSLRLSCAASGFTFSNYGMHWVRQAPGEGLEWVAAIWFDASDKYYADSVKGRFTISRDNSKNTLYLQMNSLRAEDTAVYYCARDQAIFGVVPDYWGQGTLVTVSS

SEQ ID NO: 230 - protein, 120 aa, synthetic construct
  REGION 1..120: note = source = /note="Description of Artificial Sequence: Synthetic polypeptide"
QVQLVESGGGVVQPGRSLRLSCAASGFTFSNYGMHWVRQAPGEGLEWVAAIWFDGSDKYYADAVKGRFTISRDNSKNTLYLQMNSLRAEDTAVYYCARDQAIFGVVPDYWGQGTLVTVSS

SEQ ID NO: 231 - protein, 120 aa, synthetic construct; identical to SEQ ID NO: 228
  REGION 1..120: note = source = /note="Description of Artificial Sequence: Synthetic polypeptide"

SEQ ID NO: 232 - protein, 120 aa, synthetic construct
  REGION 1..120: note = source = /note="Description of Artificial Sequence: Synthetic polypeptide"
QVQLVESGGGVVQPGRSLRLSCAASGFTFSNYGMHWVRQAPGKGLEWVAAIWFDASDKYYADAVKGRFTISRDNSKNTLYLQMNSLRAEDTAVYYCARDQAIFGVVPDYWGQGTLVTVSS

SEQ ID NO: 233 - protein, 120 aa, synthetic construct; identical to SEQ ID NO: 232
  REGION 1..120: note = source = /note="Description of Artificial Sequence: Synthetic polypeptide"

SEQ ID NO: 234 - protein, 120 aa, synthetic construct; identical to SEQ ID NO: 228
  REGION 1..120: note = source = /note="Description of Artificial Sequence: Synthetic polypeptide"

SEQ ID NO: 235 - protein, 120 aa, synthetic construct; identical to SEQ ID NO: 232
  REGION 1..120: note = source = /note="Description of Artificial Sequence: Synthetic polypeptide"

SEQ ID NO: 236 - protein, 126 aa, synthetic construct
  REGION 1..126: note = source = /note="Description of Artificial Sequence: Synthetic polypeptide"
QVQLQESGPGLVKPSETLSLTCTVSGDSISSGGYYWSWIRQPPGKGLEWIGYIYYSGSTYYNPSLKSRVTISVDTSKNQFSLKLSSVTAADTAVYYCARDRITIFGVVMGGGMDVWGQGTTVTVSS

SEQ ID NO: 237 - protein, 126 aa, synthetic construct; identical to SEQ ID NO: 236
  REGION 1..126: note = source = /note="Description of Artificial Sequence: Synthetic polypeptide"

SEQ ID NO: 238 - protein, 126 aa, synthetic construct
  REGION 1..126: note = source = /note="Description of Artificial Sequence: Synthetic polypeptide"
QVQLQESGPGLVKPSQTLSLTCTVSGDSISSGGYYWSWIRQPPGKGLEWIGYIYYSGSTYYNPSLKSRVTISVDTSKNQFSLKLSSVTAADTAVYYCARDRITIFGVVMGGGMDVWGQGTTVTVSS

SEQ ID NO: 239 - protein, 126 aa, synthetic construct
  REGION 1..126: note = source = /note="Description of Artificial Sequence: Synthetic polypeptide"
QVQLQESGPGLVKPSETLSLTCTVSGDSISSGGYYWSWIRQHPGKGLEWIGYIYYSGSTYYNPSLKSRVTISVDTSKNQFSLKLSSVTAADTAVYYCARDRITIFGVVMGGGMDVWGQGTTVTVSS

SEQ ID NO: 240 - protein, 126 aa, synthetic construct; identical to SEQ ID NO: 166
  REGION 1..126: note = source = /note="Description of Artificial Sequence: Synthetic polypeptide"

SEQ ID NO: 241 - protein, 126 aa, synthetic construct; identical to SEQ ID NO: 239
  REGION 1..126: note = source = /note="Description of Artificial Sequence: Synthetic polypeptide"

SEQ ID NO: 242 - protein, 126 aa, synthetic construct; identical to SEQ ID NO: 238
  REGION 1..126: note = source = /note="Description of Artificial Sequence: Synthetic polypeptide"

SEQ ID NO: 243 - protein, 123 aa, synthetic construct
  REGION 1..123: note = source = /note="Description of Artificial Sequence: Synthetic polypeptide"
QVQLVQSGAEVKKPGASVKVSCKASGYTFTGYYIHWVRQAPGQGLEWMGWINPESGGTDYSQRFQGRVTMTRDTSISTAYMELNRLRSDDTAVYYCAREATIFGMVIVPFDYWGQGTLVTVSS

SEQ ID NO: 244 - protein, 123 aa, synthetic construct
  REGION 1..123: note = source = /note="Description of Artificial Sequence: Synthetic polypeptide"
QVPLVQSGAEVKKPGASVKVSCKASGYTFTGYYIHWVRQAPGQGLEWMGWINPESGGTDYSQRFQGRFTMTRDTSISTAYMELNRLRSDDTAVYYCAREATIFGMVIVPFDYWGQGTLVTVSS

SEQ ID NO: 245 - protein, 123 aa, synthetic construct
  REGION 1..123: note = source = /note="Description of Artificial Sequence: Synthetic polypeptide"
QVQLVQSGAEVKKPGASVKVSCKASGYTFTGYYIHWVRQAPGQGLEWMGWINPDAGGTDYSQRFQGRVTMTRDTSISTAYMELNRLRSDDTAVYYCAREATIFGMVIVPFDYWGQGTLVTVSS

SEQ ID NO: 246 - protein, 123 aa, synthetic construct
  REGION 1..123: note = source = /note="Description of Artificial Sequence: Synthetic polypeptide"
QVPLVQSGAEVKKPGASVKVSCKASGYTFTGYYIHWVRQAPGQGLEWMGWINPDAGGTDYSQRFQGRFTMTRDTSISTAYMELNRLRSDDTAVYYCAREATIFGMVIVPFDYWGQGTLVTVSS

SEQ ID NO: 247 - protein, 123 aa, synthetic construct
  REGION 1..123: note = source = /note="Description of Artificial Sequence: Synthetic polypeptide"
QVQLVQSGAEVKKPGASVKVSCKASGYTFTGYYIHWVRQAPGQGLEWMGWINPDSGGTDYSQRFQGRVTMTRDTSISTAYMELNRLRSDDTAVYYCAREATIFGMVIVPFDYWGQGTLVTVSS

SEQ ID NO: 248 - protein, 123 aa, synthetic construct
  REGION 1..123: note = source = /note="Description of Artificial Sequence: Synthetic polypeptide"
QVQLVQSGAEVKKPGASVKVSCKASGYTFTGYYIHWVRQAPGQGLEWMGWINPDSGGTDYSQRFQGRFTMTRDTSISTAYMELNRLRSDDTAVYYCAREATIFGMVIVPFDYWGQGTLVTVSS

SEQ ID NO: 249 - protein, 123 aa, synthetic construct
  REGION 1..123: note = source = /note="Description of Artificial Sequence: Synthetic polypeptide"
QVPLVQSGAEVKKPGASVKVSCKASGYTFTGYYIHWVRQAPGQGLEWMGWINPDSGGTDYSQRFQGRVTMTRDTSISTAYMELNRLRSDDTAVYYCAREATIFGMVIVPFDYWGQGTLVTVSS

SEQ ID NO: 250 - protein, 123 aa, synthetic construct
  REGION 1..123: note = source = /note="Description of Artificial Sequence: Synthetic polypeptide"
QVQLVQSGAEVKKPGASVKVSCKASGYTFTGYYIHWVRQAPGQGLEWMGWINPDAGGTDYSQRFQGRFTMTRDTSISTAYMELNRLRSDDTAVYYCAREATIFGMVIVPFDYWGQGTLVTVSS

SEQ ID NO: 251 - protein, 123 aa, synthetic construct
  REGION 1..123: note = source = /note="Description of Artificial Sequence: Synthetic polypeptide"
QVPLVQSGAEVKKPGASVKVSCKASGYTFTGYYIHWVRQAPGQGLEWMGWINPDAGGTDYSQRFQGRVTMTRDTSISTAYMELNRLRSDDTAVYYCAREATIFGMVIVPFDYWGQGTLVTVSS

SEQ ID NO: 252 - protein, 123 aa, synthetic construct
  REGION 1..123: note = source = /note="Description of Artificial Sequence: Synthetic polypeptide"
QVQLVQSGAEVKKPGASVKVSCKASGYTFTGYYIHWVRQAPGQGLEWMGWINPDAGGTDYSQRFQGRVTMTRDTSISTAYMELNSLRSDDTAVYYCAREATIFGMVIVPFDYWGQGTLVTVSS

SEQ ID NO: 253 - protein, 123 aa, synthetic construct
  REGION 1..123: note = source = /note="Description of Artificial Sequence: Synthetic polypeptide"
QVQLVQSGAEVKKPGASVKVSCKASGYTFTGYYIHWVRQAPGQGLEWMGWINPESGGTDYSQRFQGRVTMTRDTSISTAYMELNSLRSDDTAVYYCAREATIFGMVIVPFDYWGQGTLVTVSS

SEQ ID NO: 254 - protein, 123 aa, synthetic construct
  REGION 1..123: note = source = /note="Description of Artificial Sequence: Synthetic polypeptide"
QVPLVQSGAEVKKPGASVKVSCKASGYTFTGYYIHWVRQAPGQGLVWMGWISPNSGETSYAQKFQDRVTMTRDTSISTAYMELSRLRSDDTAVYFCAREATIFGMLIVPFDYWGQGTLVTVSS

SEQ ID NO: 255 - protein, 123 aa, synthetic construct
  REGION 1..123: note = source = /note="Description of Artificial Sequence: Synthetic polypeptide"
QVPLVQSGAEVKKPGASVKVSCKASGYTFTGYYIHWVRQAPGQGLVWMGWISPNSGDTSYAQKFQDRVTMTRDTSISTAYMELSRLRSDDTAVYFCAREATIFGMLIVPFDYWGQGTLVTVSS

SEQ ID NO: 256 - protein, 123 aa, synthetic construct; identical to SEQ ID NO: 254
  REGION 1..123: note = source = /note="Description of Artificial Sequence: Synthetic polypeptide"

SEQ ID NO: 257 - protein, 123 aa, synthetic construct
  REGION 1..123: note = source = /note="Description of Artificial Sequence: Synthetic polypeptide"
QVPLVQSGAEVKKPGASVKVSCKASGYTFTGYYIHWVRQAPGQGLVWMGWISPNSGETSYAQKFQDRVTMTRDTSISTAYMELSRLRSDDTAVYFCTREATIFGMLIVPFDYWGQGTLVTVSS

SEQ ID NO: 258 - protein, 123 aa, synthetic construct; identical to SEQ ID NO: 164
  REGION 1..123: note = source = /note="Description of Artificial Sequence: Synthetic polypeptide"

SEQ ID NO: 259 - protein, 123 aa, synthetic construct; identical to SEQ ID NO: 257
  REGION 1..123: note = source = /note="Description of Artificial Sequence: Synthetic polypeptide"

SEQ ID NO: 260 - protein, 123 aa, synthetic construct; identical to SEQ ID NO: 255
  REGION 1..123: note = source = /note="Description of Artificial Sequence: Synthetic polypeptide"

SEQ ID NO: 261 - protein, 123 aa, synthetic construct
  REGION 1..123: note = source = /note="Description of Artificial Sequence: Synthetic polypeptide"
QVQLVQSGAEVKKPGASVKVSCKASGYTFTGYYIHWVRQAPGQGLEWMGWISPNSGETSYAQKFQDRVTMTRDTSISTAYMELSSLRSDDTAVYFCAREATIFGMLIVPFDYWGQGTLVTVSS

SEQ ID NO: 262 - protein, 123 aa, synthetic construct
  REGION 1..123: note = source = /note="Description of Artificial Sequence: Synthetic polypeptide"
QVQLVQSGAEVKKPGASVKVSCKASGYTFTGYYIHWVRQAPGQGLEWMGWISPNSGETSYAQKFQDRVTMTRDTSISTAYMELSRLRSDDTAVYFCAREATIFGMLIVPFDYWGQGTLVTVSS

SEQ ID NO: 263 - protein, 123 aa, synthetic construct
  REGION 1..123: note = source = /note="Description of Artificial Sequence: Synthetic polypeptide"
QVPLVQSGAEVKKPGASVKVSCKASGYTFTGYYIHWVRQAPGQGLEWMGWINPESGGTDYSQRFQGRVTMTRDTSISTAYMELSRLRSDDTAVYYCAREATIFGMVIVPFDYWGQGTLVTVSS

SEQ ID NO: 264 - protein, 123 aa, synthetic construct
  REGION 1..123: note = source = /note="Description of Artificial Sequence: Synthetic polypeptide"
QVPLVQSGAEVKKPGASVKVSCKASGYTFTGYYIHWVRQAPGQGLEWMGWINPESGGTDYSQRFQGRFTMTRDTSISTAYMELSRLRSDDTAVYYCAREATIFGMVIVPFDYWGQGTLVTVSS

SEQ ID NO: 265 - protein, 123 aa, synthetic construct
  REGION 1..123: note = source = /note="Description of Artificial Sequence: Synthetic polypeptide"
QVPLVQSGAEVKKPGASVKVSCKASGYTFTGYYIHWVRQAPGQGLEWMGWINPDSGGTDYSQRFQGRVTMTRDTSISTAYMELSRLRSDDTAVYYCAREATIFGMVIVPFDYWGQGTLVTVSS

SEQ ID NO: 266 - protein, 123 aa, synthetic construct
  REGION 1..123: note = source = /note="Description of Artificial Sequence: Synthetic polypeptide"
QVQLVQSGAEVKKPGASVKVSCKASGYTFTGYYIHWVRQAPGQGLEWMGWINPESGGTDYSQRFQGRVTMTRDTSISTAYMELSSLRSDDTAVYYCAREATIFGMVIVPFDYWGQGTLVTVSS

SEQ ID NO: 267 - protein, 123 aa, synthetic construct; identical to SEQ ID NO: 263
  REGION 1..123: note = source = /note="Description of Artificial Sequence: Synthetic polypeptide"

SEQ ID NO: 268 - protein, 123 aa, synthetic construct
  REGION 1..123: note = source = /note="Description of Artificial Sequence: Synthetic polypeptide"
QVPLVQSGAEVKKPGASVKVSCKASGYTFTGYYIHWVRQAPGQGLEWMGWISPNQGETNYAQKFQDRVTMTRDTSISTAYMELSRLRSDDTAVYYCAREATIFGMLIVPFDYWGQGTLVTVSS

SEQ ID NO: 269 - protein, 123 aa, synthetic construct
  REGION 1..123: note = source = /note="Description of Artificial Sequence: Synthetic polypeptide"
QVPLVQSGAEVKKPGASVKVSCKASGYTFTGYYIHWVRQAPGQGLEWMGWISPNQGDTNYAQKFQDRVTMTRDTSISTAYMELSRLRSDDTAVYYCAREATIFGMLIVPFDYWGQGTLVTVSS

SEQ ID NO: 270 - protein, 123 aa, synthetic construct
  REGION 1..123: note = source = /note="Description of Artificial Sequence: Synthetic polypeptide"
QVPLVQSGAEVKKPGASVKVSCKASGYTFTGYYIHWVRQAPGQGLEWMGWISPNQGETNYAQKFQDRVTMTRDTSISTAYMELSRLRSDDTAVYYCTREATIFGMLIVPFDYWGQGTLVTVSS

SEQ ID NO: 271 - protein, 123 aa, synthetic construct
  REGION 1..123: note = source = /note="Description of Artificial Sequence: Synthetic polypeptide"
QVPLVQSGAEVKKPGASVKVSCKASGYTFTGYYIHWVRQAPGQGLEWMGWISPNNGETNYAQKFQDRVTMTRDTSISTAYMELSRLRSDDTAVYYCAREATIFGMLIVPFDYWGQGTLVTVSS

SEQ ID NO: 272 - protein, 123 aa, synthetic construct
  REGION 1..123: note = source = /note="Description of Artificial Sequence: Synthetic polypeptide"
QVPLVQSGAEVKKPGASVKVSCKASGYTFTGYYIHWVRQAPGQGLEWMGWISPNNGDTNYAQKFQDRVTMTRDTSISTAYMELSRLRSDDTAVYYCAREATIFGMLIVPFDYWGQGTLVTVSS

SEQ ID NO: 273 - protein, 123 aa, synthetic construct
  REGION 1..123: note = source = /note="Description of Artificial Sequence: Synthetic polypeptide"
QVPLVQSGAEVKKPGASVKVSCKASGYTFTGYYIHWVRQAPGQGLEWMGWISPNQGDTNYAQKFQDRVTMTRDTSISTAYMELSRLRSDDTAVYYCTREATIFGMLIVPFDYWGQGTLVTVSS

SEQ ID NO: 274 - protein, 123 aa, synthetic construct
  REGION 1..123: note = source = /note="Description of Artificial Sequence: Synthetic polypeptide"
QVPLVQSGAEVKKPGASVKVSCKASGYTFTGYYIHWVRQAPGQGLEWMGWISPNNGETNYAQKFQDRVTMTRDTSISTAYMELSRLRSDDTAVYYCTREATIFGMLIVPFDYWGQGTLVTVSS

SEQ ID NO: 275 - protein, 123 aa, synthetic construct; identical to SEQ ID NO: 268
  REGION 1..123: note = source = /note="Description of Artificial Sequence: Synthetic polypeptide"

SEQ ID NO: 276 - protein, 123 aa, synthetic construct; identical to SEQ ID NO: 272
  REGION 1..123: note = source = /note="Description of Artificial Sequence: Synthetic polypeptide"

SEQ ID NO: 277 - protein, 123 aa, synthetic construct; identical to SEQ ID NO: 269
  REGION 1..123: note = source = /note="Description of Artificial Sequence: Synthetic polypeptide"

SEQ ID NO: 278 - protein, 123 aa, synthetic construct; identical to SEQ ID NO: 271
  REGION 1..123: note = source = /note="Description of Artificial Sequence: Synthetic polypeptide"

SEQ ID NO: 279 - protein, 123 aa, synthetic construct
  REGION 1..123: note = source = /note="Description of Artificial Sequence: Synthetic polypeptide"
QVQLVQSGAEVKKPGASVKVSCKASGYTFTGYYIHWVRQAPGQGLEWMGWISPNQGETNYAQKFQDRVTMTRDTSISTAYMELSSLRSDDTAVYYCAREATIFGMLIVPFDYWGQGTLVTVSS

SEQ ID NO: 280 - protein, 123 aa, synthetic construct; identical to SEQ ID NO: 279
  REGION 1..123: note = source = /note="Description of Artificial Sequence: Synthetic polypeptide"

SEQ ID NO: 281 - protein, 128 aa, synthetic construct; identical to SEQ ID NO: 158
  REGION 1..128: note = source = /note="Description of Artificial Sequence: Synthetic polypeptide"

SEQ ID NO: 282 - protein, 128 aa, synthetic construct; identical to SEQ ID NO: 158
  REGION 1..128: note = source = /note="Description of Artificial Sequence: Synthetic polypeptide"

SEQ ID NO: 283 - protein, 128 aa, synthetic construct; identical to SEQ ID NO: 158
  REGION 1..128: note = source = /note="Description of Artificial Sequence: Synthetic polypeptide"

SEQ ID NO: 284 - protein, 128 aa, synthetic construct; identical to SEQ ID NO: 158
  REGION 1..128: note = source = /note="Description of Artificial Sequence: Synthetic polypeptide"

SEQ ID NO: 285 - protein, 128 aa, synthetic construct; identical to SEQ ID NO: 158
  REGION 1..128: note = source = /note="Description of Artificial Sequence: Synthetic polypeptide"

SEQ ID NO: 286 - protein, 128 aa, synthetic construct; identical to SEQ ID NO: 158
  REGION 1..128: note = source = /note="Description of Artificial Sequence: Synthetic polypeptide"

SEQ ID NO: 287 - protein, 128 aa, synthetic construct; identical to SEQ ID NO: 158
  REGION 1..128: note = source = /note="Description of Artificial Sequence: Synthetic polypeptide"

SEQ ID NO: 288 - protein, 128 aa, synthetic construct; identical to SEQ ID NO: 158
  REGION 1..128: note = source = /note="Description of Artificial Sequence: Synthetic polypeptide"

SEQ ID NO: 289 - protein, 128 aa, synthetic construct; identical to SEQ ID NO: 158
  REGION 1..128: note = source = /note="Description of Artificial Sequence: Synthetic polypeptide"

SEQ ID NO: 290 - protein, 128 aa, synthetic construct; identical to SEQ ID NO: 158
  REGION 1..128: note = source = /note="Description of Artificial Sequence: Synthetic polypeptide"

SEQ ID NO: 291 - protein, 128 aa, synthetic construct; identical to SEQ ID NO: 158
  REGION 1..128: note = source = /note="Description of Artificial Sequence: Synthetic polypeptide"

SEQ ID NO: 292 - protein, 128 aa, synthetic construct; identical to SEQ ID NO: 158
  REGION 1..128: note = source = /note="Description of Artificial Sequence: Synthetic polypeptide"

SEQ ID NO: 293 - protein, 128 aa, synthetic construct
  REGION 1..128: note = source = /note="Description of Artificial Sequence: Synthetic polypeptide"
QMQVVQSGAEVKKPGASVKVSCKASGYTFTGYYMHWVRQAPGQGLEWMGWINPNSGGTNYAQKFQGRVTMTRDTSISTAYMELSSLRSDDTAVYYCARGGDYVFGTYRPHYYYGMDVWGQGTTVTVSS

SEQ ID NO: 294 - protein, 128 aa, synthetic construct
  REGION 1..128: note = source = /note="Description of Artificial Sequence: Synthetic polypeptide"
QMQVVQSGAEVKKPGASVKVSCKASGYTFTGYYMHWVRQAPGQGLEWMGWINPNSGGTNYAQKFQGRVTMTRDTSISTAYMELSRLRSDDTAVYYCARGGDYVFGTYRPHYYYGMDVWGQGTTVTVSS

SEQ ID NO: 295 - protein, 121 aa, synthetic construct; identical to SEQ ID NO: 195
  REGION 1..121: note = source = /note="Description of Artificial Sequence: Synthetic polypeptide"

SEQ ID NO: 296 - protein, 121 aa, synthetic construct; identical to SEQ ID NO: 177
  REGION 1..121: note = source = /note="Description of Artificial Sequence: Synthetic polypeptide"

SEQ ID NO: 297 - protein, 128 aa, synthetic construct; identical to SEQ ID NO: 158
  REGION 1..128: note = source = /note="Description of Artificial Sequence: Synthetic polypeptide"

SEQ ID NO: 298 - protein, 121 aa, synthetic construct
  REGION 1..121: note = source = /note="Description of Artificial Sequence: Synthetic polypeptide"
QVQLVESGGGVVQPGRSLRLSCTASGFTFSSYGIHWVRQAPGKGLEWVAVIWYDGSNKFHADSVKGRFTISRDNSKNTLYLQMNSLRAEDSAMYFCARGKVAGMPEAFEIWGQGTKVTVSS

SEQ ID NO: 299 - protein, 129 aa, synthetic construct
  REGION 1..129: note = source = /note="Description of Artificial Sequence: Synthetic polypeptide"
QMQLVQSGAEVKKPGASVKVSCKASGYTFTSYDINWVRQATGQGLEWMGWMNPNSGNTGYAQKFQGRVTMTRDTSISTAYMELSSLRSQDTAVYYCARGGDYVWGSYRPYYYYYGMDVWGQGTTVTVSS

SEQ ID NO: 300 - protein, 121 aa, synthetic construct
  REGION 1..121: note = source = /note="Description of Artificial Sequence: Synthetic polypeptide"
QVQLVESGGGVVQPGRSLRLSCAASGFTFSSYGIHWVRQAPGKGLEWVAVIWYDASNKFHADAVKGRFTISRDNSKNTLYLQMNSLRAEDSAMYFCARGKVAGMPEAFEIWGQGTKVTVSS

SEQ ID NO: 301 - protein, 121 aa, synthetic construct
  REGION 1..121: note = source = /note="Description of Artificial Sequence: Synthetic polypeptide"
QVQLVESGGGVVQPGRSLRLSCTASGFTFSSYGIHWVRQAPGKGLEWVAVIWYDASNKFHADAVKGRFTISRDNSKNTLYLQMNSLRAEDSAMYFCARGKVAGMPEAFEIWGQGTKVTVSS

SEQ ID NO: 302 - protein, 121 aa, synthetic construct; identical to SEQ ID NO: 300
  REGION 1..121: note = source = /note="Description of Artificial Sequence: Synthetic polypeptide"

SEQ ID NO: 303 - protein, 121 aa, synthetic construct
  REGION 1..121: note = source = /note="Description of Artificial Sequence: Synthetic polypeptide"
QVQLVESGGGVVQPGRSLRLSCAASGFTFSSYGIHWVRQAPGKGLEWVAVIWYDASNKFHADAVKGRFTISRDNSKNTLYLQMNSLRAEDSAMYFCARGKVAGMPEAFEIWGQGTLVTVSS

SEQ ID NO: 304 - protein, 121 aa, synthetic construct
  REGION 1..121: note = source = /note="Description of Artificial Sequence: Synthetic polypeptide"
QVQLVESGGGVVQPGRSLRLSCAASGFTFSSYGIHWVRQAPGKGLEWVAVIWYDASNKFHADSVKGRFTISRDNSKNTLYLQMNSLRAEDSAMYFCARGKVAGMPEAFEIWGQGTKVTVSS

SEQ ID NO: 305 - protein, 121 aa, synthetic construct
  REGION 1..121: note = source = /note="Description of Artificial Sequence: Synthetic polypeptide"
QVQLVESGGGVVQPGRSLRLSCAASGFTFSSYGIHWVRQAPGKGLEWVAVIWYDGSNKFHADAVKGRFTISRDNSKNTLYLQMNSLRAEDSAMYFCARGKVAGMPEAFEIWGQGTKVTVSS

SEQ ID NO: 306 - protein, 129 aa, synthetic construct
  REGION 1..129: note = source = /note="Description of Artificial Sequence: Synthetic polypeptide"
QMQLVQSGAEVKKPGASVKVSCKASGYTFTSYDINWVRQATGQGLEWMGWMNPNSGGTGYAQKFQGRVTMTRDTSISTAYMELSSLRSQDTAVYYCARGGDYVWGSYRPYYYYYGMDVWGQGTTVTVSS

SEQ ID NO: 307 - protein, 129 aa, synthetic construct; identical to SEQ ID NO: 299
  REGION 1..129: note = source = /note="Description of Artificial Sequence: Synthetic polypeptide"

SEQ ID NO: 308 - protein, 129 aa, synthetic construct; identical to SEQ ID NO: 306
  REGION 1..129: note = source = /note="Description of Artificial Sequence: Synthetic polypeptide"

SEQ ID NO: 309 - protein, 129 aa, synthetic construct
  REGION 1..129: note = source = /note="Description of Artificial Sequence: Synthetic polypeptide"
QMQLVQSGAEVKKPGASVKVSCKASGYTFTSYDINWVRQAPGQGLEWMGWMNPNSGGTGYAQKFQGRVTMTRDTSISTAYMELSSLRSDDTAVYYCARGGDYVWGSYRPYYYYYGMDVWGQGTTVTVSS

SEQ ID NO: 310 - protein, 129 aa, synthetic construct; identical to SEQ ID NO: 306
  REGION 1..129: note = source = /note="Description of Artificial Sequence: Synthetic polypeptide"

SEQ ID NO: 311 - protein, 129 aa, synthetic construct
  REGION 1..129: note = source = /note="Description of Artificial Sequence: Synthetic polypeptide"
QMQLVQSGAEVKKPGASVKVSCKASGYTFTSYDINWVRQAPGQGLEWMGWMNPNSGNTGYAQKFQGRVTMTRDTSISTAYMELSSLRSDDTAVYYCARGGDYVWGSYRPYYYYYGMDVWGQGTTVTVSS

SEQ ID NO: 312 - protein, 129 aa, synthetic construct
  REGION 1..129: note = source = /note="Description of Artificial Sequence: Synthetic polypeptide"
QMQLVQSGAEVKKPGASVKVSCKASGYTFTSYDINWVRQATGQGLEWMGWMNPNSGGTGYAQKFQGRVTMTRDTSISTAYMELSSLRSQDTAVYYCARGGDYVFGSYRPYYYYYGMDVWGQGTTVTVSS

SEQ ID NO: 313 - protein, 129 aa, synthetic construct
  REGION 1..129: note = source = /note="Description of Artificial Sequence: Synthetic polypeptide"
QMQLVQSGAEVKKPGASVKVSCKASGYTFTSYDINWVRQAPGQGLEWMGWMNPNSGGTGYAQKFQGRVTMTRDTSISTAYMELSSLRSDDTAVYYCARGGDYVFGSYRPYYYYYGMDVWGQGTTVTVSS

SEQ ID NO: 314 - protein, 121 aa, synthetic construct; identical to SEQ ID NO: 303
  REGION 1..121: note = source = /note="Description of Artificial Sequence: Synthetic polypeptide"

SEQ ID NO: 315 - protein, 216 aa, synthetic construct
  REGION 1..216: note = source = /note="Description of Artificial Sequence: Synthetic polypeptide"
QSVLTQPPSASGTPGQRVTISCSGSSSNIGSNTVNWYQHLPGTAPKLLIYTNNQRPSGVPDRFSGSKSGTSASLAISGLQSEDEADYFCATFDDSLNGPVFGGGTKLTVLGQPKAAPSVTLFPPSSEELQANKATLVCLISDFYPGAVTVAWKADSSPVKAGVETTTPSKQSNNKYAASSYLSLTPEQWKSHRSYSCQVTHEGSTVEKTVAPTECS

SEQ ID NO: 316 - protein, 214 aa, synthetic construct
  REGION 1..214: note = source = /note="Description of Artificial Sequence: Synthetic polypeptide"
DIQMTQSPSSLSASIGDRVTITCRASQDIRDYLGWYQQKPGKAPKRLIYGASSLQSGVPSRFSGSGSGTEFTLTISSLQPEDFATYYCLQHNNYPFTFGPGTKVDIKRTVAAPSVFIFPPSDEQLKSGTASVVCLLNNFYPREAKVQWKVDNALQSGNSQESVTEQDSKDSTYSLSSTLTLSKADYEKHKVYACEVTHQGLSSPVTKSFNRGEC

SEQ ID NO: 317 - protein, 214 aa, synthetic construct; identical to SEQ ID NO: 316
  REGION 1..214: note = source = /note="Description of Artificial Sequence: Synthetic polypeptide"

SEQ ID NO: 318 - protein, 213 aa, synthetic construct
  REGION 1..213: note = source = /note="Description of Artificial Sequence: Synthetic polypeptide"
DIQMTQSPSSLSASVGDRVTITCQASQDISNYLNWYQQKPGKAPKLLIYDASNLETGVPSRFSGSGSGTDFSFTISSLQPEDIATYYCQQYDILLTFGGGTKVEIKRTVAAPSVFIFPPSDEQLKSGTASVVCLLNNFYPREAKVQWKVDNALQSGNSQESVTEQDSKDSTYSLSSTLTLSKADYEKHKVYACEVTHQGLSSPVTKSFNRGEC

SEQ ID NO: 319 - protein, 220 aa, synthetic construct
  REGION 1..220: note = source = /note="Description of Artificial Sequence: Synthetic polypeptide"
DIVMTQSPDSLAVSLGERATINCKSSQSVLSSSNNKNYIAWYQQQPGHPPKLLIYWASTRESGVPDRFSGSGSGTDFTLTISSLQAEDVAVFYCQQYYSTPWTFGQGTKVEIKRTVAAPSVFIFPPSDEQLKSGTASVVCLLNNFYPREAKVQWKVDNALQSGNSQESVTEQDSKDSTYSLSSTLTLSKADYEKHKVYACEVTHQGLSSPVTKSFNRGEC

SEQ ID NO: 320 - protein, 220 aa, synthetic construct
  REGION 1..220: note = source = /note="Description of Artificial Sequence: Synthetic polypeptide"
DIVMTQSPDSLAVSLGERATINCKSSQSVLSSSNNKNYIAWYQQKPGHPPKLLIYWASTRESGVPDRFSGSGSGTDFTLTISSLQAEDVAVFYCQQYYSTPWTFGQGTKVEIKRTVAAPSVFIFPPSDEQLKSGTASVVCLLNNFYPREAKVQWKVDNALQSGNSQESVTEQDSKDSTYSLSSTLTLSKADYEKHKVYACEVTHQGLSSPVTKSFNRGEC

SEQ ID NO: 321 - protein, 220 aa, synthetic construct
  REGION 1..220: note = source = /note="Description of Artificial Sequence: Synthetic polypeptide"
DIVMTQSPDSLSVSLGERATINCKSSQSVLSSSNNKNYLAWYQQKPGQPPNLLIYWTSTRDSGVPDRFSGSGSGTDFTLTINSLQAEDVAVYYCQQYYRTPWTFGQGTKVEIKRTVAAPSVFIFPPSDEQLKSGTASVVCLLNNFYPREAKVQWKVDNALQSGNSQESVTEQDSKDSTYSLSSTLTLSKADYEKHKVYACEVTHQGLSSPVTKSFNRGEC

SEQ ID NO: 322 - protein, 220 aa, synthetic construct; identical to SEQ ID NO: 321
  REGION 1..220: note = source = /note="Description of Artificial Sequence: Synthetic polypeptide"

SEQ ID NO: 323 - protein, 215 aa, synthetic construct
  REGION 1..215: note = source = /note="Description of Artificial Sequence: Synthetic polypeptide"
EIVLTQSPGTLSLSPGERATLSCRASQSISYSYLAWYQQKPGQAPRLLIYGASSRATGIPDRFSGSGSGTDFTLTISRQEPDDFAVYYCQQYGSSPLTFGGGTKVEIKRTVAAPSVFIFPPSDEQLKSGTASVVCLLNNFYPREAKVQWKVDNALQSGNSQESVTEQDSKDSTYSLSSTLTLSKADYEKHKVYACEVTHQGLSSPVTKSFNRGEC

SEQ ID NO: 324 - protein, 214 aa, synthetic construct
  REGION 1..214: note = source = /note="Description of Artificial Sequence: Synthetic polypeptide"
EIVMTQSPATLSVSPGERATLSCRASQSVSSNLAWYQQKPGQAPRLLIYGAATRATGIPARVSGSGSGTEFTLTISSLQSEDFAVYYCQQYNNWPLTFGGGTKVEIKRTVAAPSVFIFPPSDEQLKSGTASVVCLLNNFYPREAKVQWKVDNALQSGNSQESVTEQDSKDSTYSLSSTLTLSKADYEKHKVYACEVTHQGLSSPVTKSFNRGEC

SEQ ID NO: 325 - protein, 214 aa, synthetic construct
  REGION 1..214: note = source = /note="Description of Artificial Sequence: Synthetic polypeptide"
DIQMTQSPSSLSASVGDRVTITCRASQGIRNELGWYQQKPGKAPKRLIYGASSLQSGVPSRFSGSGSGTEFTLTISSLQPEDFVTYYCLQHNSYPFTFGPGTKVDVKRTVAAPSVFIFPPSDEQLKSGTASVVCLLNNFYPREAKVQWKVDNALQSGNSQESVTEQDSKDSTYSLSSTLTLSKADYEKHKVYACEVTHQGLSSPVTKSFNRGEC

SEQ ID NO: 326 - protein, 213 aa, synthetic construct
  REGION 1..213: note = source = /note="Description of Artificial Sequence: Synthetic polypeptide"
DIQMTQSPSSLSASVGDRVTITCQASQDITNYLNWYQQKPGKAPKLLIYDASNLEPGVPSRFSGSGSGTDFTFTISSLQPEDIATYYCQQYDDLFTFGPGTKVDIKRTVAAPSVFIFPPSDEQLKSGTASVVCLLNNFYPREAKVQWKVDNALQSGNSQESVTEQDSKDSTYSLSSTLTLSKADYEKHKVYACEVTHQGLSSPVTKSFNRGEC

SEQ ID NO: 327 - protein, 214 aa, synthetic construct
  REGION 1..214: note = source = /note="Description of Artificial Sequence: Synthetic polypeptide"
DIQMTQSPSSVSASVGDRVTITCRASQGLIIWLAWYQQKPGKAPKLLIYAASSLQSGVPSRFSGSGSGTDFTLTISSLQPEDFATYYCQQTNSFPPTFGQGTKVEIKRTVAAPSVFIFPPSDEQLKSGTASVVCLLNNFYPREAKVQWKVDNALQSGNSQESVTEQDSKDSTYSLSSTLTLSKADYEKHKVYACEVTHQGLSSPVTKSFNRGEC

SEQ ID NO: 328 - protein, 214 aa, synthetic construct; identical to SEQ ID NO: 327
  REGION 1..214: note = source = /note="Description of Artificial Sequence: Synthetic polypeptide"

SEQ ID NO: 329 - protein, 214 aa, synthetic construct
  REGION 1..214: note = source = /note="Description of Artificial Sequence: Synthetic polypeptide"
DIQMTQSPSSLSASVGDRVTITCRASQGIRNELGWYQQKPGKAPKLLIYGASSLQSGVPSRFSGSGSGTEFTLTISSLQPEDFVTYYCLQHNSYPFTFGQGTKVDVKRTVAAPSVFIFPPSDEQLKSGTASVVCLLNNFYPREAKVQWKVDNALQSGNSQESVTEQDSKDSTYSLSSTLTLSKADYEKHKVYACEVTHQGLSSPVTKSFNRGEC

SEQ ID NO: 330 - protein, 214 aa, synthetic construct; identical to SEQ ID NO: 329
  REGION 1..214: note = source = /note="Description of Artificial Sequence: Synthetic polypeptide"

SEQ ID NO: 331 - protein, 214 aa, synthetic construct; identical to SEQ ID NO: 329
  REGION 1..214: note = source = /note="Description of Artificial Sequence: Synthetic polypeptide"

SEQ ID NO: 332 - protein, 214 aa, synthetic construct
  REGION 1..214: note = source = /note="Description of Artificial Sequence: Synthetic polypeptide"
DIQMTQSPSSLSASVGDRVTITCRASQGIRNELGWYQQKPGKAPKLLIYGASSLQSGVPSRFSGSGSGTEFTLTISSLQPEDFVTYYCLQHNSYPFTFGPGTKVDVKRTVAAPSVFIFPPSDEQLKSGTASVVCLLNNFYPREAKVQWKVDNALQSGNSQESVTEQDSKDSTYSLSSTLTLSKADYEKHKVYACEVTHQGLSSPVTKSFNRGEC

SEQ ID NO: 333 - protein, 214 aa, synthetic construct
  REGION 1..214: note = source = /note="Description of Artificial Sequence: Synthetic polypeptide"
DIQMTQSPSSLSASVGDRVTITCRASQGIRNELGWYQQKPGKAPKRLIYGASSLQSGVPSRFSGSGSGTEFTLTISSLQPEDFVTYYCLQHNSYPFTFGQGTKVDVKRTVAAPSVFIFPPSDEQLKSGTASVVCLLNNFYPREAKVQWKVDNALQSGNSQESVTEQDSKDSTYSLSSTLTLSKADYEKHKVYACEVTHQGLSSPVTKSFNRGEC

SEQ ID NO: 334 - protein, 214 aa, synthetic construct; identical to SEQ ID NO: 329
  REGION 1..214: note = source = /note="Description of Artificial Sequence: Synthetic polypeptide"

SEQ ID NO: 335 - protein, 214 aa, synthetic construct
  REGION 1..214: note = source = /note="Description of Artificial Sequence: Synthetic polypeptide"
DIQMTQSPSSLSASIGDRVTITCRASQDIRDYLGWYQQKPGKAPKLLIYGASSLQSGVPSRFSGSGSGTEFTLTISSLQPEDFATYYCLQHNNYPFTFGQGTKVDIKRTVAAPSVFIFPPSDEQLKSGTASVVCLLNNFYPREAKVQWKVDNALQSGNSQESVTEQDSKDSTYSLSSTLTLSKADYEKHKVYACEVTHQGLSSPVTKSFNRGEC

SEQ ID NO: 336 - protein, 214 aa, synthetic construct
  REGION 1..214: note = source = /note="Description of Artificial Sequence: Synthetic polypeptide"
DIQMTQSPSSLSASIGDRVTITCRASQDIRDYLGWYQQKPGKAPKRLIYGASSLQSGVPSRFSGSGSGTEFTLTISSLQPEDFATYYCLQHNNYPFTFGQGTKVDIKRTVAAPSVFIFPPSDEQLKSGTASVVCLLNNFYPREAKVQWKVDNALQSGNSQESVTEQDSKDSTYSLSSTLTLSKADYEKHKVYACEVTHQGLSSPVTKSFNRGEC

SEQ ID NO: 337 - protein, 214 aa, synthetic construct
  REGION 1..214: note = source = /note="Description of Artificial Sequence: Synthetic polypeptide"
DIQMTQSPSSLSASIGDRVTITCRASQDIRDYLGWYQQKPGKAPKLLIYGASSLQSGVPSRFSGSGSGTEFTLTISSLQPEDFATYYCLQHNNYPFTFGPGTKVDIKRTVAAPSVFIFPPSDEQLKSGTASVVCLLNNFYPREAKVQWKVDNALQSGNSQESVTEQDSKDSTYSLSSTLTLSKADYEKHKVYACEVTHQGLSSPVTKSFNRGEC

SEQ ID NO: 338 - protein, 214 aa, synthetic construct; identical to SEQ ID NO: 335
  REGION 1..214: note = source = /note="Description of Artificial Sequence: Synthetic polypeptide"

SEQ ID NO: 339 - protein, 214 aa, synthetic construct; identical to SEQ ID NO: 335
  REGION 1..214: note = source = /note="Description of Artificial Sequence: Synthetic polypeptide"

SEQ ID NO: 340 - protein, 214 aa, synthetic construct; identical to SEQ ID NO: 335
  REGION 1..214: note = source = /note="Description of Artificial Sequence: Synthetic polypeptide"

SEQ ID NO: 341 - protein, 214 aa, synthetic construct; identical to SEQ ID NO: 335
  REGION 1..214: note = source = /note="Description of Artificial Sequence: Synthetic polypeptide"

SEQ ID NO: 342 - protein, 214 aa, synthetic construct
  REGION 1..214: note = source = /note="Description of Artificial Sequence: Synthetic polypeptide"
DIQMTQSPSSLSASIGDRVTITCRASQDLRNYLGWYHQKPGKAPKRLIYGASSLQSGVPSRFSGSGSGTEFTLTISSLQPEDFATYYCLQHNNYPFTFGPGTKVDIKRTVAAPSVFIFPPSDEQLKSGTASVVCLLNNFYPREAKVQWKVDNALQSGNSQESVTEQDSKDSTYSLSSTLTLSKADYEKHKVYACEVTHQGLSSPVTKSFNRGEC

SEQ ID NO: 343 - protein, 214 aa, synthetic construct
  REGION 1..214: note = source = /note="Description of Artificial Sequence: Synthetic polypeptide"
DIQMTQSPSSLSASIGDRVTITCRASQDLRNYLGWYQQKPGKAPKLLIYGASSLQSGVPSRFSGSGSGTEFTLTISSLQPEDFATYYCLQHNNYPFTFGPGTKVDIKRTVAAPSVFIFPPSDEQLKSGTASVVCLLNNFYPREAKVQWKVDNALQSGNSQESVTEQDSKDSTYSLSSTLTLSKADYEKHKVYACEVTHQGLSSPVTKSFNRGEC

SEQ ID NO: 344 - protein, 214 aa, synthetic construct; identical to SEQ ID NO: 343
  REGION 1..214: note = source = /note="Description of Artificial Sequence: Synthetic polypeptide"

SEQ ID NO: 345 - protein, 214 aa, synthetic construct
  REGION 1..214: note = source = /note="Description of Artificial Sequence: Synthetic polypeptide"
DIQMTQSPSSLSASIGDRVTITCRASQDLRNYLGWYHQKPGKAPKLLIYGASSLQSGVPSRFSGSGSGTEFTLTISSLQPEDFATYYCLQHNNYPFTFGPGTKVDIKRTVAAPSVFIFPPSDEQLKSGTASVVCLLNNFYPREAKVQWKVDNALQSGNSQESVTEQDSKDSTYSLSSTLTLSKADYEKHKVYACEVTHQGLSSPVTKSFNRGEC

SEQ ID NO: 346 - protein, 214 aa, synthetic construct
  REGION 1..214: note = source = /note="Description of Artificial Sequence: Synthetic polypeptide"
DIQMTQSPSSLSASIGDRVTITCRASQDLRNYLGWYQQKPGKAPKRLIYGASSLQSGVPSRFSGSGSGTEFTLTISSLQPEDFATYYCLQHNNYPFTFGPGTKVDIKRTVAAPSVFIFPPSDEQLKSGTASVVCLLNNFYPREAKVQWKVDNALQSGNSQESVTEQDSKDSTYSLSSTLTLSKADYEKHKVYACEVTHQGLSSPVTKSFNRGEC

SEQ ID NO: 347 - protein, 214 aa, synthetic construct; identical to SEQ ID NO: 346
  REGION 1..214: note = source = /note="Description of Artificial Sequence: Synthetic polypeptide"

SEQ ID NO: 348 - protein, 214 aa, synthetic construct; identical to SEQ ID NO: 345
  REGION 1..214: note = source = /note="Description of Artificial Sequence: Synthetic polypeptide"

SEQ ID NO: 349 - protein, 214 aa, synthetic construct; identical to SEQ ID NO: 342
  REGION 1..214: note = source = /note="Description of Artificial Sequence: Synthetic polypeptide"

SEQ ID NO: 350 - protein, 214 aa, synthetic construct; identical to SEQ ID NO: 343
  REGION 1..214: note = source = /note="Description of Artificial Sequence: Synthetic polypeptide"

SEQ ID NO: 351 - protein, 214 aa, synthetic construct; identical to SEQ ID NO: 343
  REGION 1..214: note = source = /note="Description of Artificial Sequence: Synthetic polypeptide"

SEQ ID NO: 352 - protein, 214 aa, synthetic construct
  REGION 1..214: note = source = /note="Description of Artificial Sequence: Synthetic polypeptide"
DIQMTQSPSSLSASIGDRVTITCRASQDLRNYLGWYQQKPGKAPKLLIYGASSLQSGVPSRFSGSGSGTEFTLTISSLQPEDFATYYCLQHNNYPFTFGQGTKVDIKRTVAAPSVFIFPPSDEQLKSGTASVVCLLNNFYPREAKVQWKVDNALQSGNSQESVTEQDSKDSTYSLSSTLTLSKADYEKHKVYACEVTHQGLSSPVTKSFNRGEC

SEQ ID NO: 353 - protein, 214 aa, synthetic construct; identical to SEQ ID NO: 343
  REGION 1..214: note = source = /note="Description of Artificial Sequence: Synthetic polypeptide"

SEQ ID NO: 354 - protein, 213 aa, synthetic construct
  REGION 1..213: note = source = /note="Description of Artificial Sequence: Synthetic polypeptide"
DIQMTQSPSSLSASVGDRVTITCQASQDISNYLNWYQQKPGKAPKLLIYDASNLETGVPSRFSGSGSGTDFSLTISSLQPEDFATYYCQQYDILLTFGGGTKVEIKRTVAAPSVFIFPPSDEQLKSGTASVVCLLNNFYPREAKVQWKVDNALQSGNSQESVTEQDSKDSTYSLSSTLTLSKADYEKHKVYACEVTHQGLSSPVTKSFNRGEC

SEQ ID NO: 355 - protein, 213 aa, synthetic construct; identical to SEQ ID NO: 354
  REGION 1..213: note = source = /note="Description of Artificial Sequence: Synthetic polypeptide"

SEQ ID NO: 356 - protein, 213 aa, synthetic construct
  REGION 1..213: note = source = /note="Description of Artificial Sequence: Synthetic polypeptide"
DIQMTQSPSSLSASVGDRVTITCQASQDISNYLNWYQQKPGKAPKLLIYDASNLETGVPSRFSGSGSGTDFSLTISSLQPEDIATYYCQQYDILLTFGGGTKVEIKRTVAAPSVFIFPPSDEQLKSGTASVVCLLNNFYPREAKVQWKVDNALQSGNSQESVTEQDSKDSTYSLSSTLTLSKADYEKHKVYACEVTHQGLSSPVTKSFNRGEC

SEQ ID NO: 357 - protein, 213 aa, synthetic construct
  REGION 1..213: note = source = /note="Description of Artificial Sequence: Synthetic polypeptide"
DIQMTQSPSSLSASVGDRVTITCQASQDISNYLNWYQQKPGKAPKLLIYDASNLETGVPSRFSGSGSGTDFSFTISSLQPEDFATYYCQQYDILLTFGGGTKVEIKRTVAAPSVFIFPPSDEQLKSGTASVVCLLNNFYPREAKVQWKVDNALQSGNSQESVTEQDSKDSTYSLSSTLTLSKADYEKHKVYACEVTHQGLSSPVTKSFNRGEC

SEQ ID NO: 358 - protein, 213 aa, synthetic construct; identical to SEQ ID NO: 356
  REGION 1..213: note = source = /note="Description of Artificial Sequence: Synthetic polypeptide"

SEQ ID NO: 359 - protein, 213 aa, synthetic construct; identical to SEQ ID NO: 357
  REGION 1..213: note = source = /note="Description of Artificial Sequence: Synthetic polypeptide"

SEQ ID NO: 360 - protein, 213 aa, synthetic construct; identical to SEQ ID NO: 318
  REGION 1..213: note = source = /note="Description of Artificial Sequence: Synthetic polypeptide"

SEQ ID NO: 361 - protein, 213 aa, synthetic construct; identical to SEQ ID NO: 354
  REGION 1..213: note = source = /note="Description of Artificial Sequence: Synthetic polypeptide"

SEQ ID NO: 362 - protein, 213 aa, synthetic construct; identical to SEQ ID NO: 354
  REGION 1..213: note = source = /note="Description of Artificial Sequence: Synthetic polypeptide"

SEQ ID NO: 363 - protein, 214 aa, synthetic construct; identical to SEQ ID NO: 316
  REGION 1..214: note = source = /note="Description of Artificial Sequence: Synthetic polypeptide"

SEQ ID NO: 364 - protein, 214 aa, synthetic construct; identical to SEQ ID NO: 316
  REGION 1..214: note = source = /note="Description of Artificial Sequence: Synthetic polypeptide"

SEQ ID NO: 365 - protein, 214 aa, synthetic construct; identical to SEQ ID NO: 335
  REGION 1..214: note = source = /note="Description of Artificial Sequence: Synthetic polypeptide"

SEQ ID NO: 366 - protein, 214 aa, synthetic construct; identical to SEQ ID NO: 335
  REGION 1..214: note = source = /note="Description of Artificial Sequence: Synthetic polypeptide"

SEQ ID NO: 367 - protein, 214 aa, synthetic construct; identical to SEQ ID NO: 337
  REGION 1..214: note = source = /note="Description of Artificial Sequence: Synthetic polypeptide"

SEQ ID NO: 368 - protein, 214 aa, synthetic construct; identical to SEQ ID NO: 337
  REGION 1..214: note = source = /note="Description of Artificial Sequence: Synthetic polypeptide"

SEQ ID NO: 369 - protein, 214 aa, synthetic construct; identical to SEQ ID NO: 337
  REGION 1..214: note = source = /note="Description of Artificial Sequence: Synthetic polypeptide"

SEQ ID NO: 370 - protein, 213 aa, synthetic construct
  REGION 1..213: note = source = /note="Description of Artificial Sequence: Synthetic polypeptide"
DIQMTQSPSSLSASVGDRVTITCQASQDITNYLNWYQQKPGKAPKLLIYDASNLEPGVPSRFSGSGSGTDFTLTISSLQPEDFATYYCQQYDDLFTFGPGTKVDIKRTVAAPSVFIFPPSDEQLKSGTASVVCLLNNFYPREAKVQWKVDNALQSGNSQESVTEQDSKDSTYSLSSTLTLSKADYEKHKVYACEVTHQGLSSPVTKSFNRGEC

SEQ ID NO: 371 - protein, 213 aa, synthetic construct
  REGION 1..213: note = source = /note="Description of Artificial Sequence: Synthetic polypeptide"
DIQMTQSPSSLSASVGDRVTITCQASQDITNYLNWYQQKPGKAPKLLIYDASNLEPGVPSRFSGSGSGTDFTLTISSLQPEDIATYYCQQYDDLFTFGPGTKVDIKRTVAAPSVFIFPPSDEQLKSGTASVVCLLNNFYPREAKVQWKVDNALQSGNSQESVTEQDSKDSTYSLSSTLTLSKADYEKHKVYACEVTHQGLSSPVTKSFNRGEC

SEQ ID NO: 372 - protein, 213 aa, synthetic construct; identical to SEQ ID NO: 370
  REGION 1..213: note = source = /note="Description of Artificial Sequence: Synthetic polypeptide"

SEQ ID NO: 373 - protein, 213 aa, synthetic construct
  REGION 1..213: note = source = /note="Description of Artificial Sequence: Synthetic polypeptide"
DIQMTQSPSSLSASVGDRVTITCQASQDITNYLNWYQQKPGKAPKLLIYDASNLEPGVPSRFSGSGSGTDFTFTISSLQPEDFATYYCQQYDDLFTFGPGTKVDIKRTVAAPSVFIFPPSDEQLKSGTASVVCLLNNFYPREAKVQWKVDNALQSGNSQESVTEQDSKDSTYSLSSTLTLSKADYEKHKVYACEVTHQGLSSPVTKSFNRGEC

SEQ ID NO: 374 - protein, 213 aa, synthetic construct; identical to SEQ ID NO: 371
  REGION 1..213: note = source = /note="Description of Artificial Sequence: Synthetic polypeptide"

SEQ ID NO: 375 - protein, 213 aa, synthetic construct; identical to SEQ ID NO: 373
  REGION 1..213: note = source = /note="Description of Artificial Sequence: Synthetic polypeptide"

SEQ ID NO: 376 - protein, 213 aa, synthetic construct; identical to SEQ ID NO: 326
  REGION 1..213: note = source = /note="Description of Artificial Sequence: Synthetic polypeptide"

SEQ ID NO: 377 - protein, 213 aa, synthetic construct; identical to SEQ ID NO: 370
  REGION 1..213: note = source = /note="Description of Artificial Sequence: Synthetic polypeptide"

SEQ ID NO: 378 - protein, 213 aa, synthetic construct; identical to SEQ ID NO: 370
  REGION 1..213: note = source = /note="Description of Artificial Sequence: Synthetic polypeptide"

SEQ ID NO: 379 - protein, 213 aa, synthetic construct
  REGION 1..213: note = source = /note="Description of Artificial Sequence: Synthetic polypeptide"
DIQMTQSPSSLSASVGDRVTITCQASQDITNYLNWYQQKPGKAPKLLIYDASNLEPGVPSRFSGSGSGTDFTLTISSLQPEDFATYYCQQYDDLFTFGQGTKVDIKRTVAAPSVFIFPPSDEQLKSGTASVVCLLNNFYPREAKVQWKVDNALQSGNSQESVTEQDSKDSTYSLSSTLTLSKADYEKHKVYACEVTHQGLSSPVTKSFNRGEC

SEQ ID NO: 380 - protein, 213 aa, synthetic construct; identical to SEQ ID NO: 379
  REGION 1..213: note = source = /note="Description of Artificial Sequence: Synthetic polypeptide"

SEQ ID NO: 381 - protein, 214 aa, synthetic construct
  REGION 1..214: note = source = /note="Description of Artificial Sequence: Synthetic polypeptide"
EIVLTQSPGTLSLSPGERATLSCRASQIFTSTYLAWYQQKPGQAPRLLIYGASSRATGIPDRFSGSGSGTDFTLTISRLEPEDFAVYYCQQYGSSPRFGQGTRLEIKRTVAAPSVFIFPPSDEQLKSGTASVVCLLNNFYPREAKVQWKVDNALQSGNSQESVTEQDSKDSTYSLSSTLTLSKADYEKHKVYACEVTHQGLSSPVTKSFNRGEC

SEQ ID NO: 382 - protein, 214 aa, synthetic construct; identical to SEQ ID NO: 381
  REGION 1..214: note = source = /note="Description of Artificial Sequence: Synthetic polypeptide"

SEQ ID NO: 383 - protein, 214 aa, synthetic construct; identical to SEQ ID NO: 381
  REGION 1..214: note = source = /note="Description of Artificial Sequence: Synthetic polypeptide"

SEQ ID NO: 384 - protein, 214 aa, synthetic construct; identical to SEQ ID NO: 381
  REGION 1..214: note = source = /note="Description of Artificial Sequence: Synthetic polypeptide"

SEQ ID NO: 385 - protein, 214 aa, synthetic construct
  REGION 1..214: note = source = /note="Description of Artificial Sequence: Synthetic polypeptide"
EIVMTQSPATLSVSPGERATLSCRASQSVSSNLAWYQQKPGQAPRLLIYGAATRATGIPARFSGSGSGTEFTLTISSLQSEDFAVYYCQQYNNWPLTFGGGTKVEIKRTVAAPSVFIFPPSDEQLKSGTASVVCLLNNFYPREAKVQWKVDNALQSGNSQESVTEQDSKDSTYSLSSTLTLSKADYEKHKVYACEVTHQGLSSPVTKSFNRGEC

SEQ ID NO: 386 - protein, 214 aa, synthetic construct; identical to SEQ ID NO: 385
  REGION 1..214: note = source = /note="Description of Artificial Sequence: Synthetic polypeptide"

SEQ ID NO: 387 - protein, 214 aa, synthetic construct; identical to SEQ ID NO: 385
  REGION 1..214: note = source = /note="Description of Artificial Sequence: Synthetic polypeptide"

SEQ ID NO: 388 - protein, 214 aa, synthetic construct; identical to SEQ ID NO: 324
  REGION 1..214: note = source = /note="Description of Artificial Sequence: Synthetic polypeptide"

SEQ ID NO: 389 - protein, 214 aa, synthetic construct
  REGION 1..214: note = source = /note="Description of Artificial Sequence: Synthetic polypeptide"
EIVMTQSPATLSVSPGERATLSCRASQSVSSNLAWYQQKPGQAPRLLIYGAATRATGIPARFSGSGSGTEFTLTISSLEPEDFAVYYCQQYNNFPLTFGGGTKVEIKRTVAAPSVFIFPPSDEQLKSGTASVVCLLNNFYPREAKVQWKVDNALQSGNSQESVTEQDSKDSTYSLSSTLTLSKADYEKHKVYACEVTHQGLSSPVTKSFNRGEC

SEQ ID NO: 390 - protein, 214 aa, synthetic construct
  REGION 1..214: note = source = /note="Description of Artificial Sequence: Synthetic polypeptide"
EIVMTQSPATLSVSPGERATLSCRASQSVSSNLAWYQQKPGQAPRLLIYGAATRATGIPARFSGSGSGTEFTLTISSLEPEDFAVYYCQQYNNYPLTFGGGTKVEIKRTVAAPSVFIFPPSDEQLKSGTASVVCLLNNFYPREAKVQWKVDNALQSGNSQESVTEQDSKDSTYSLSSTLTLSKADYEKHKVYACEVTHQGLSSPVTKSFNRGEC

SEQ ID NO: 391 - protein, 214 aa, synthetic construct
  REGION 1..214: note = source = /note="Description of Artificial Sequence: Synthetic polypeptide"
EIVMTQSPATLSVSPGERATLSCRASQSVSSNLAWYQQKPGQAPRLLIYGAATRATGIPARFSGSGSGTEFTLTISSLEPEDFAVYYCQQYNNWPLTFGGGTKVEIKRTVAAPSVFIFPPSDEQLKSGTASVVCLLNNFYPREAKVQWKVDNALQSGNSQESVTEQDSKDSTYSLSSTLTLSKADYEKHKVYACEVTHQGLSSPVTKSFNRGEC

SEQ ID NO: 392 - protein, 214 aa, synthetic construct; identical to SEQ ID NO: 391
  REGION 1..214: note = source = /note="Description of Artificial Sequence: Synthetic polypeptide"

SEQ ID NO: 393 - protein, 215 aa, synthetic construct
  REGION 1..215: note = source = /note="Description of Artificial Sequence: Synthetic polypeptide"
EIVLTQSPGTLSLSPGERATLSCRASQSISYSYLAWYQQKPGQAPRLLIYGASSRATGIPDRFSGSGSGTDFTLTISRLEPDDFAVYYCQQYGSSPLTFGGGTKVEIKRTVAAPSVFIFPPSDEQLKSGTASVVCLLNNFYPREAKVQWKVDNALQSGNSQESVTEQDSKDSTYSLSSTLTLSKADYEKHKVYACEVTHQGLSSPVTKSFNRGEC

SEQ ID NO: 394 - protein, 215 aa, synthetic construct; identical to SEQ ID NO: 323
  REGION 1..215: note = source = /note="Description of Artificial Sequence: Synthetic polypeptide"

SEQ ID NO: 395 - protein, 215 aa, synthetic construct; identical to SEQ ID NO: 393
  REGION 1..215: note = source = /note="Description of Artificial Sequence: Synthetic polypeptide"

SEQ ID NO: 396 - protein, 215 aa, synthetic construct; identical to SEQ ID NO: 393
  REGION 1..215: note = source = /note="Description of Artificial Sequence: Synthetic polypeptide"

SEQ ID NO: 397 - protein, 215 aa, synthetic construct; identical to SEQ ID NO: 393
  REGION 1..215: note = source = /note="Description of Artificial Sequence: Synthetic polypeptide"

SEQ ID NO: 398 - protein, 215 aa, synthetic construct; identical to SEQ ID NO: 323
  REGION 1..215: note = source = /note="Description of Artificial Sequence: Synthetic polypeptide"

SEQ ID NO: 399 - protein, 215 aa, synthetic construct; identical to SEQ ID NO: 323
  REGION 1..215: note = source = /note="Description of Artificial Sequence: Synthetic polypeptide"

SEQ ID NO: 400 - protein, 220 aa, synthetic construct; identical to SEQ ID NO: 319
  REGION 1..220: note = source = /note="Description of Artificial Sequence: Synthetic polypeptide"

SEQ ID NO: 401 - protein, 220 aa, synthetic construct; identical to SEQ ID NO: 319
  REGION 1..220: note = source = /note="Description of Artificial Sequence: Synthetic polypeptide"

SEQ ID NO: 402 - protein, 220 aa, synthetic construct; identical to SEQ ID NO: 319
  REGION 1..220: note = source = /note="Description of Artificial Sequence: Synthetic polypeptide"

SEQ ID NO: 403 - protein, 220 aa, synthetic construct; identical to SEQ ID NO: 319
  REGION 1..220: note = source = /note="Description of Artificial Sequence: Synthetic polypeptide"

SEQ ID NO: 404 - protein, 220 aa, synthetic construct; identical to SEQ ID NO: 319
  REGION 1..220: note = source = /note="Description of Artificial Sequence: Synthetic polypeptide"

SEQ ID NO: 405 - protein, 220 aa, synthetic construct; identical to SEQ ID NO: 319
  REGION 1..220: note = source = /note="Description of Artificial Sequence: Synthetic polypeptide"

SEQ ID NO: 406 - protein, 220 aa, synthetic construct; identical to SEQ ID NO: 319
  REGION 1..220: note = source = /note="Description of Artificial Sequence: Synthetic polypeptide"

SEQ ID NO: 407 - protein, 220 aa, synthetic construct; identical to SEQ ID NO: 319
  REGION 1..220: note = source = /note="Description of Artificial Sequence: Synthetic polypeptide"

SEQ ID NO: 408 - protein, 220 aa, synthetic construct; identical to SEQ ID NO: 319
  REGION 1..220: note = source = /note="Description of Artificial Sequence: Synthetic polypeptide"

SEQ ID NO: 409 - protein, 220 aa, synthetic construct
  REGION 1..220: note = source = /note="Description of Artificial Sequence: Synthetic polypeptide"
DIVMTQSPDSLAVSLGERATINCKSSQSVLSSSNNKNYIAWYQQKPGQPPKLLIYWASTRESGVPDRFSGSGSGTDFTLTISSLQAEDVAVFYCQQYYSTPWTFGQGTKVEIKRTVAAPSVFIFPPSDEQLKSGTASVVCLLNNFYPREAKVQWKVDNALQSGNSQESVTEQDSKDSTYSLSSTLTLSKADYEKHKVYACEVTHQGLSSPVTKSFNRGEC

SEQ ID NO: 410 - protein, 220 aa, synthetic construct; identical to SEQ ID NO: 409
  REGION 1..220: note = source = /note="Description of Artificial Sequence: Synthetic polypeptide"

SEQ ID NO: 411 - protein, 220 aa, synthetic construct
  REGION 1..220: note = source = /note="Description of Artificial Sequence: Synthetic polypeptide"
DIVMTQSPDSLSVSLGERATINCKSSQSVLSSSNNKNYLAWYQQKPGQPPNLLIYWTSTRESGVPDRFSGSGSGTDFTLTINSLQAEDVAVYYCQQYYRTPWTFGQGTKVEIKRTVAAPSVFIFPPSDEQLKSGTASVVCLLNNFYPREAKVQWKVDNALQSGNSQESVTEQDSKDSTYSLSSTLTLSKADYEKHKVYACEVTHQGLSSPVTKSFNRGEC

SEQ ID NO: 412 - protein, 220 aa, synthetic construct; identical to SEQ ID NO: 411
  REGION 1..220: note = source = /note="Description of Artificial Sequence: Synthetic polypeptide"

SEQ ID NO: 413 - protein, 220 aa, synthetic construct; identical to SEQ ID NO: 321
  REGION 1..220: note = source = /note="Description of Artificial Sequence: Synthetic polypeptide"

SEQ ID NO: 414 - protein, 220 aa, synthetic construct; identical to SEQ ID NO: 411
  REGION 1..220: note = source = /note="Description of Artificial Sequence: Synthetic polypeptide"

SEQ ID NO: 415 - protein, 220 aa, synthetic construct; identical to SEQ ID NO: 411
  REGION 1..220: note = source = /note="Description of Artificial Sequence: Synthetic polypeptide"

SEQ ID NO: 416 - protein, 220 aa, synthetic construct; identical to SEQ ID NO: 321
  REGION 1..220: note = source = /note="Description of Artificial Sequence: Synthetic polypeptide"

SEQ ID NO: 417 - protein, 220 aa, synthetic construct; identical to SEQ ID NO: 321
  REGION 1..220: note = source = /note="Description of Artificial Sequence: Synthetic polypeptide"

SEQ ID NO: 418 - protein, 220 aa, synthetic construct
  REGION 1..220: note = source = /note="Description of Artificial Sequence: Synthetic polypeptide"
DIVMTQSPDSLAVSLGERATINCKSSQSVLSSSNNKNYLAWYQQKPGQPPKLLIYWTSTRESGVPDRFSGSGSGTDFTLTINSLQAEDVAVYYCQQYYRTPWTFGQGTKVEIKRTVAAPSVFIFPPSDEQLKSGTASVVCLLNNFYPREAKVQWKVDNALQSGNSQESVTEQDSKDSTYSLSSTLTLSKADYEKHKVYACEVTHQGLSSPVTKSFNRGEC

SEQ ID NO: 419 - protein, 220 aa, synthetic construct; identical to SEQ ID NO: 411
  REGION 1..220: note = source = /note="Description of Artificial Sequence: Synthetic polypeptide"

SEQ ID NO: 420 - protein, 220 aa, synthetic construct; identical to SEQ ID NO: 320
  REGION 1..220: note = source = /note="Description of Artificial Sequence: Synthetic polypeptide"

SEQ ID NO: 421 - protein, 220 aa, synthetic construct; identical to SEQ ID NO: 320
  REGION 1..220: note = source = /note="Description of Artificial Sequence: Synthetic polypeptide"

SEQ ID NO: 422 - protein, 220 aa, synthetic construct; identical to SEQ ID NO: 320
  REGION 1..220: note = source = /note="Description of Artificial Sequence: Synthetic polypeptide"

SEQ ID NO: 423 - protein, 220 aa, synthetic construct; identical to SEQ ID NO: 409
  REGION 1..220: note = source = /note="Description of Artificial Sequence: Synthetic polypeptide"

SEQ ID NO: 424 - protein, 220 aa, synthetic construct; identical to SEQ ID NO: 409
  REGION 1..220: note = source = /note="Description of Artificial Sequence: Synthetic polypeptide"

SEQ ID NO: 425 - protein, 220 aa, synthetic construct; identical to SEQ ID NO: 321
  REGION 1..220: note = source = /note="Description of Artificial Sequence: Synthetic polypeptide"

SEQ ID NO: 426 - protein, 220 aa, synthetic construct; identical to SEQ ID NO: 321
  REGION 1..220: note = source = /note="Description of Artificial Sequence: Synthetic polypeptide"

SEQ ID NO: 427 - protein, 220 aa, synthetic construct; identical to SEQ ID NO: 321
  REGION 1..220: note = source = /note="Description of Artificial Sequence: Synthetic polypeptide"

SEQ ID NO: 428 - protein, 220 aa, synthetic construct; identical to SEQ ID NO: 321
  REGION 1..220: note = source = /note="Description of Artificial Sequence: Synthetic polypeptide"

SEQ ID NO: 429 - protein, 220 aa, synthetic construct; identical to SEQ ID NO: 321
  REGION 1..220: note = source = /note="Description of Artificial Sequence: Synthetic polypeptide"

SEQ ID NO: 430 - protein, 220 aa, synthetic construct; identical to SEQ ID NO: 321
  REGION 1..220: note = source = /note="Description of Artificial Sequence: Synthetic polypeptide"

SEQ ID NO: 431 - protein, 220 aa, synthetic construct; identical to SEQ ID NO: 321
  REGION 1..220: note = source = /note="Description of Artificial Sequence: Synthetic polypeptide"

SEQ ID NO: 432 - protein, 220 aa, synthetic construct; identical to SEQ ID NO: 411
  REGION 1..220: note = source = /note="Description of Artificial Sequence: Synthetic polypeptide"

SEQ ID NO: 433 - protein, 220 aa, synthetic construct; identical to SEQ ID NO: 411
  REGION 1..220: note = source = /note="Description of Artificial Sequence: Synthetic polypeptide"

SEQ ID NO: 434 - protein, 220 aa, synthetic construct; identical to SEQ ID NO: 411
  REGION 1..220: note = source = /note="Description of Artificial Sequence: Synthetic polypeptide"

SEQ ID NO: 435 - protein, 220 aa, synthetic construct; identical to SEQ ID NO: 411
  REGION 1..220: note = source = /note="Description of Artificial Sequence: Synthetic polypeptide"

SEQ ID NO: 436 - protein, 220 aa, synthetic construct
  REGION 1..220: note = source = /note="Description of Artificial Sequence: Synthetic polypeptide"
DIVMTQSPDSLAVSLGERATINCKSSQSVLSSSNNKNYLAWYQQKPGQPPKLLIYWTSTRDSGVPDRFSGSGSGTDFTLTINSLQAEDVAVYYCQQYYRTPWTFGQGTKVEIKRTVAAPSVFIFPPSDEQLKSGTASVVCLLNNFYPREAKVQWKVDNALQSGNSQESVTEQDSKDSTYSLSSTLTLSKADYEKHKVYACEVTHQGLSSPVTKSFNRGEC

SEQ ID NO: 437 - protein, 220 aa, synthetic construct; identical to SEQ ID NO: 418
  REGION 1..220: note = source = /note="Description of Artificial Sequence: Synthetic polypeptide"

SEQ ID NO: 438 - protein, 216 aa, synthetic construct
  REGION 1..216: note = source = /note="Description of Artificial Sequence: Synthetic polypeptide"
QSVLTQPPSASGTPGQRVTISCSGSSSNIGSQTVNWYQHLPGTAPKLLIYTNNQRPSGVPDRFSGSKSGTSASLAISGLQSEDEADYFCATFDESLSGPVFGGGTKLTVLGQPKAAPSVTLFPPSSEELQANKATLVCLISDFYPGAVTVAWKADSSPVKAGVETTTPSKQSNNKYAASSYLSLTPEQWKSHRSYSCQVTHEGSTVEKTVAPTECS

SEQ ID NO: 439 - protein, 216 aa, synthetic construct
  REGION 1..216: note = source = /note="Description of Artificial Sequence: Synthetic polypeptide"
QSVLTQPPSASGTPGQRVTISCSGSSSNIGSQTVNWYQHLPGTAPKLLIYTNNQRPSGVPDRFSGSKSGTSASLAISGLQSEDEADYFCATFDESLQGPVFGGGTKLTVLGQPKAAPSVTLFPPSSEELQANKATLVCLISDFYPGAVTVAWKADSSPVKAGVETTTPSKQSNNKYAASSYLSLTPEQWKSHRSYSCQVTHEGSTVEKTVAPTECS

SEQ ID NO: 440 - protein, 216 aa, synthetic construct
  REGION 1..216: note = source = /note="Description of Artificial Sequence: Synthetic polypeptide"
QSVLTQPPSASGTPGQRVTISCSGSSSNIGSNYVNWYQHLPGTAPKLLIYTNNQRPSGVPDRFSGSKSGTSASLAISGLQSEDEADYFCATFDESLSGPVFGGGTKLTVLGQPKAAPSVTLFPPSSEELQANKATLVCLISDFYPGAVTVAWKADSSPVKAGVETTTPSKQSNNKYAASSYLSLTPEQWKSHRSYSCQVTHEGSTVEKTVAPTECS

SEQ ID NO: 441 - protein, 216 aa, synthetic construct
  REGION 1..216: note = source = /note="Description of Artificial Sequence: Synthetic polypeptide"
QSVLTQPPSASGTPGQRVTISCSGSSSNIGSNYVNWYQHLPGTAPKLLIYTNNQRPSGVPDRFSGSKSGTSASLAISGLQSEDEADYFCATFDESLQGPVFGGGTKLTVLGQPKAAPSVTLFPPSSEELQANKATLVCLISDFYPGAVTVAWKADSSPVKAGVETTTPSKQSNNKYAASSYLSLTPEQWKSHRSYSCQVTHEGSTVEKTVAPTECS

SEQ ID NO: 442 - protein, 216 aa, synthetic construct
  REGION 1..216: note = source = /note="Description of Artificial Sequence: Synthetic polypeptide"
QSVLTQPPSASGTPGQRVTISCSGSSSNIGSQTVNWYQHLPGTAPKLLIYTNNQRPSGVPDRFSGSKSGTSASLAISGLQSEDEADYFCATFDDSLNGPVFGGGTKLTVLGQPKAAPSVTLFPPSSEELQANKATLVCLISDFYPGAVTVAWKADSSPVKAGVETTTPSKQSNNKYAASSYLSLTPEQWKSHRSYSCQVTHEGSTVEKTVAPTECS

SEQ ID NO: 443 - protein, 216 aa, synthetic construct
  REGION 1..216: note = source = /note="Description of Artificial Sequence: Synthetic polypeptide"
QSVLTQPPSASGTPGQRVTISCSGSSSNIGSNYVNWYQHLPGTAPKLLIYTNNQRPSGVPDRFSGSKSGTSASLAISGLQSEDEADYFCATFDDSLNGPVFGGGTKLTVLGQPKAAPSVTLFPPSSEELQANKATLVCLISDFYPGAVTVAWKADSSPVKAGVETTTPSKQSNNKYAASSYLSLTPEQWKSHRSYSCQVTHEGSTVEKTVAPTECS

SEQ ID NO: 444 - protein, 216 aa, synthetic construct
  REGION 1..216: note = source = /note="Description of Artificial Sequence: Synthetic polypeptide"
QSVLTQPPSASGTPGQRVTISCSGSSSNIGSNTVNWYQHLPGTAPKLLIYTNNQRPSGVPDRFSGSKSGTSASLAISGLQSEDEADYFCATFDESLNGPVFGGGTKLTVLGQPKAAPSVTLFPPSSEELQANKATLVCLISDFYPGAVTVAWKADSSPVKAGVETTTPSKQSNNKYAASSYLSLTPEQWKSHRSYSCQVTHEGSTVEKTVAPTECS

SEQ ID NO: 445 - protein, 216 aa, synthetic construct
  REGION 1..216: note = source = /note="Description of Artificial Sequence: Synthetic polypeptide"
QSVLTQPPSASGTPGQRVTISCSGSSSNIGSNTVNWYQHLPGTAPKLLIYTNNQRPSGVPDRFSGSKSGTSASLAISGLQSEDEADYFCATFDDSLQGPVFGGGTKLTVLGQPKAAPSVTLFPPSSEELQANKATLVCLISDFYPGAVTVAWKADSSPVKAGVETTTPSKQSNNKYAASSYLSLTPEQWKSHRSYSCQVTHEGSTVEKTVAPTECS

SEQ ID NO: 446 - protein, 216 aa, synthetic construct
  REGION 1..216: note = source = /note="Description of Artificial Sequence: Synthetic polypeptide"
QSVLTQPPSASGTPGQRVTISCSGSSSNIGSNTVNWYQHLPGTAPKLLIYTNNQRPSGVPDRFSGSKSGTSASLAISGLQSEDEADYFCATFDDSLSGPVFGGGTKLTVLGQPKAAPSVTLFPPSSEELQANKATLVCLISDFYPGAVTVAWKADSSPVKAGVETTTPSKQSNNKYAASSYLSLTPEQWKSHRSYSCQVTHEGSTVEKTVAPTECS

SEQ ID NO: 447 - protein, 216 aa, synthetic construct
  REGION 1..216: note = source = /note="Description of Artificial Sequence: Synthetic polypeptide"
QSVLTQPPSASGTPGQRVTISCSGSSSNIGSNTVNWYQHLPGTAPKLLIYTNNQRPSGVPDRFSGSKSGTSASLAISGLQSEDEADYFCATFDDSLNAPVFGGGTKLTVLGQPKAAPSVTLFPPSSEELQANKATLVCLISDFYPGAVTVAWKADSSPVKAGVETTTPSKQSNNKYAASSYLSLTPEQWKSHRSYSCQVTHEGSTVEKTVAPTECS

SEQ ID NO: 448 - protein, 216 aa, synthetic construct
  REGION 1..216: note = source = /note="Description of Artificial Sequence: Synthetic polypeptide"
QSVLTQPPSASGTPGQRVTISCSGSSSNIGSNTVNWYQHLPGTAPKLLIYTNNQRPSGVPDRFSGSKSGTSASLAISGLQSEDEADYFCATFDSSLNGPVFGGGTKLTVLGQPKAAPSVTLFPPSSEELQANKATLVCLISDFYPGAVTVAWKADSSPVKAGVETTTPSKQSNNKYAASSYLSLTPEQWKSHRSYSCQVTHEGSTVEKTVAPTECS

SEQ ID NO: 449 - protein, 216 aa, synthetic construct
  REGION 1..216: note = source = /note="Description of Artificial Sequence: Synthetic polypeptide"
QSVLTQPPSASGTPGQRVTISCSGSSSNIGSNYVNWYQHLPGTAPKLLIYTNNQRPSGVPDRFSGSKSGTSASLAISGLQSEDEADYFCATFDSSLNAPVFGGGTKLTVLGQPKAAPSVTLFPPSSEELQANKATLVCLISDFYPGAVTVAWKADSSPVKAGVETTTPSKQSNNKYAASSYLSLTPEQWKSHRSYSCQVTHEGSTVEKTVAPTECS

SEQ ID NO: 450 - protein, 216 aa, synthetic construct; identical to SEQ ID NO: 449
  REGION 1..216: note = source = /note="Description of Artificial Sequence: Synthetic polypeptide"

SEQ ID NO: 451 - protein, 216 aa, synthetic construct; identical to SEQ ID NO: 438
  REGION 1..216: note = source = /note="Description of Artificial Sequence: Synthetic polypeptide"

SEQ ID NO: 452 - protein, 214 aa, synthetic construct
  REGION 1..214: note = source = /note="Description of Artificial Sequence: Synthetic polypeptide"
DIQMTQSPSSLSASIGDRVTITCRASQDLRNYLGWYQQKPGKAPKRLIYGASSLQSGVPSRFSGSGSGTEFTLTISSLQPEDFATYYCLQHNNYPFTFGQGTKVDIKRTVAAPSVFIFPPSDEQLKSGTASVVCLLNNFYPREAKVQWKVDNALQSGNSQESVTEQDSKDSTYSLSSTLTLSKADYEKHKVYACEVTHQGLSSPVTKSFNRGEC

SEQ ID NO: 453 - protein, 214 aa, synthetic construct; identical to SEQ ID NO: 336
  REGION 1..214: note = source = /note="Description of Artificial Sequence: Synthetic polypeptide"

SEQ ID NO: 454 - protein, 216 aa, synthetic construct
  REGION 1..216: note = source = /note="Description of Artificial Sequence: Synthetic polypeptide"
QSVLTQPPSASGTPGQRVTISCSGSSSNIGSNTVNWYQQLPGTAPKLLIYTNNQRPSGVPDRFSGSKSGTSASLAISGLQSEDEADYFCATFDSSLSGPVFGGGTKLTVLGQPKAAPSVTLFPPSSEELQANKATLVCLISDFYPGAVTVAWKADSSPVKAGVETTTPSKQSNNKYAASSYLSLTPEQWKSHRSYSCQVTHEGSTVEKTVAPTECS

SEQ ID NO: 455 - protein, 214 aa, synthetic construct
  REGION 1..214: note = source = /note="Description of Artificial Sequence: Synthetic polypeptide"
DIQLTQSPSSLSASVGDRVTITCRASQTISRFLNWYQQKPGKAPELLIYVASSLQSGVPSRFSGSGSGTDFTLTISSLQPEDFATYYCQQSYSTLISFGQGTKLEITRTVAAPSVFIFPPSDEQLKSGTASVVCLLNNFYPREAKVQWKVDNALQSGNSQESVTEQDSKDSTYSLSSTLTLSKADYEKHKVYACEVTHQGLSSPVTKSFNRGEC

SEQ ID NO: 456 - protein, 216 aa, synthetic construct
  REGION 1..216: note = source = /note="Description of Artificial Sequence: Synthetic polypeptide"
QSVLTQPPSVSAAPGQKVTISCSGSSSNIGNNYVSWYEQFPGTAPKLLIYDNNKRPSGIPDRFSGSKSGTSATLGITGLQTGDEADYYCGTWDSSLSAVVFGGGTKLTVLGQPKAAPSVTLFPPSSEELQANKATLVCLISDFYPGAVTVAWKADSSPVKAGVETTTPSKQSNNKYAASSYLSLTPEQWKSHRSYSCQVTHEGSTVEKTVAPTECS

SEQ ID NO: 457 - protein, 214 aa, synthetic construct
  REGION 1..214: note = source = /note="Description of Artificial Sequence: Synthetic polypeptide"
DIQLTQSPSSLSASVGDRVTITCRASQTISRFLNWYQQKPGKAPELLIYVASSLQSGVPSRFSGSGSGTDFTLTISSLQPEDFATYYCQQSYSTLISFGQGTKLEIKRTVAAPSVFIFPPSDEQLKSGTASVVCLLNNFYPREAKVQWKVDNALQSGNSQESVTEQDSKDSTYSLSSTLTLSKADYEKHKVYACEVTHQGLSSPVTKSFNRGEC

SEQ ID NO: 458 - protein, 214 aa, synthetic construct; identical to SEQ ID NO: 457
  REGION 1..214: note = source = /note="Description of Artificial Sequence: Synthetic polypeptide"

SEQ ID NO: 459 - protein, 214 aa, synthetic construct; identical to SEQ ID NO: 455
  REGION 1..214: note = source = /note="Description of Artificial Sequence: Synthetic polypeptide"

SEQ ID NO: 460 - protein, 214 aa, synthetic construct
  REGION 1..214: note = source = /note="Description of Artificial Sequence: Synthetic polypeptide"
DIQLTQSPSSLSASVGDRVTITCRASQTISRFLNWYQQKPGKAPKLLIYVASSLQSGVPSRFSGSGSGTDFTLTISSLQPEDFATYYCQQSYSTLISFGQGTKLEIKRTVAAPSVFIFPPSDEQLKSGTASVVCLLNNFYPREAKVQWKVDNALQSGNSQESVTEQDSKDSTYSLSSTLTLSKADYEKHKVYACEVTHQGLSSPVTKSFNRGEC

SEQ ID NO: 461 - protein, 214 aa, synthetic construct; identical to SEQ ID NO: 457
  REGION 1..214: note = source = /note="Description of Artificial Sequence: Synthetic polypeptide"

SEQ ID NO: 462 - protein, 214 aa, synthetic construct; identical to SEQ ID NO: 457
  REGION 1..214: note = source = /note="Description of Artificial Sequence: Synthetic polypeptide"

SEQ ID NO: 463 - protein, 216 aa, synthetic construct
  REGION 1..216: note = source = /note="Description of Artificial Sequence: Synthetic polypeptide"
QSVLTQPPSVSAAPGQKVTISCSGSSSNIGNNYVSWYQQLPGTAPKLLIYDNNKRPSGIPDRFSGSKSGTSATLGITGLQTGDEADYYCGTWDSSLSAVVFGGGTKLTVLGQPKAAPSVTLFPPSSEELQANKATLVCLISDFYPGAVTVAWKADSSPVKAGVETTTPSKQSNNKYAASSYLSLTPEQWKSHRSYSCQVTHEGSTVEKTVAPTECS

SEQ ID NO: 464 - protein, 216 aa, synthetic construct; identical to SEQ ID NO: 463
  REGION 1..216: note = source = /note="Description of Artificial Sequence: Synthetic polypeptide"

SEQ ID NO: 465 - protein, 216 aa, synthetic construct; identical to SEQ ID NO: 456
  REGION 1..216: note = source = /note="Description of Artificial Sequence: Synthetic polypeptide"

SEQ ID NO: 466 - protein, 216 aa, synthetic construct
  REGION 1..216: note = source = /note="Description of Artificial Sequence: Synthetic polypeptide"
QSVLTQPPSVSAAPGQKVTISCSGSSSNIGNNYVSWYQQLPGTAPKLLIYDNNKRPSGIPDRFSGSKSGTSATLAITGLQTGDEADYYCGTFESSLSAVVFGGGTKLTVLGQPKAAPSVTLFPPSSEELQANKATLVCLISDFYPGAVTVAWKADSSPVKAGVETTTPSKQSNNKYAASSYLSLTPEQWKSHRSYSCQVTHEGSTVEKTVAPTECS

SEQ ID NO: 467 - protein, 216 aa, synthetic construct
  REGION 1..216: note = source = /note="Description of Artificial Sequence: Synthetic polypeptide"
QSVLTQPPSVSAAPGQKVTISCSGSSSNIGNNYVSWYQQLPGTAPKLLIYDNNKRPSGIPDRFSGSKSGTSATLAITGLQTGDEADYYCGTWDSSLSAVVFGGGTKLTVLGQPKAAPSVTLFPPSSEELQANKATLVCLISDFYPGAVTVAWKADSSPVKAGVETTTPSKQSNNKYAASSYLSLTPEQWKSHRSYSCQVTHEGSTVEKTVAPTECS

SEQ ID NO: 468 - protein, 216 aa, synthetic construct; identical to SEQ ID NO: 467
  REGION 1..216: note = source = /note="Description of Artificial Sequence: Synthetic polypeptide"

SEQ ID NO: 469 - protein, 216 aa, synthetic construct; identical to SEQ ID NO: 463
  REGION 1..216: note = source = /note="Description of Artificial Sequence: Synthetic polypeptide"

SEQ ID NO: 470 - protein, 216 aa, synthetic construct; identical to SEQ ID NO: 466
  REGION 1..216: note = source = /note="Description of Artificial Sequence: Synthetic polypeptide"

SEQ ID NO: 471 - protein, 214 aa, synthetic construct
  REGION 1..214: note = source = /note="Description of Artificial Sequence: Synthetic polypeptide"
DIQLTQSPSSLSASVGDRVTITCRASQTISRFLNWYQQKPGKAPKLLIYVASSLQSGVPSRFSGSGSGTDFTLTISSLQPEDFATYYCQQSYSTLLSFGQGTKLEIKRTVAAPSVFIFPPSDEQLKSGTASVVCLLNNFYPREAKVQWKVDNALQSGNSQESVTEQDSKDSTYSLSSTLTLSKADYEKHKVYACEVTHQGLSSPVTKSFNRGEC

SEQ ID NO: 472 - protein, 458 aa, synthetic construct
  REGION 1..458: note = source = /note="Description of Artificial Sequence: Synthetic polypeptide"
QMQVVQSGAEVKKPGASVKVSCKASGYTFTGYYMHWVRQAPGQGLEWMGWINPNSGGTNYAQKFQGRVTMTRDTSISTAYMELSRLRSDDTAVYYCARGGDYVWGTYRPHYYYGMDVWGQGTTVTVSSASTKGPSVFPLAPSSKSTSGGTAALGCLVKDYFPEPVTVSWNSGALTSGVHTFPAVLQSSGLYSLSSVVTVPSSSLGTQTYICNVNHKPSNTKVDKKVEPKSCDKTHTCPPCPAPELLGGPSVFLFPPKPKDTLMISRTPEVTCVVVDVSHEDPEVKFNWYVDGVEVHNAKTKPCEEQYGSTYRCVSVLTVLHQDWLNGKEYKCKVSNKALPAPIEKTISKAKGQPREPQVYTLPPSREEMTKNQVSLTCLVKGFYPSDIAVEWESNGQPENNYKTTPPVLDSDGSFFLYSKLTVDKSRWQQGNVFSCSVMHEALHNHYTQKSLSLSPGK

SEQ ID NO: 473 - protein, 451 aa, synthetic construct
  REGION 1..451: note = source = /note="Description of Artificial Sequence: Synthetic polypeptide"
QVQLVESGGGVVQPGRSLRLSCAASGFTFSNFGMHWVRQAPGKGLEWVAVIWYDGSNENYADSVKGRFTISRDNSKNTLYLHMNSLRVADTAVYYCARDGTIFGVVLGDYWGQGTLVTVSSASTKGPSVFPLAPSSKSTSGGTAALGCLVKDYFPEPVTVSWNSGALTSGVHTFPAVLQSSGLYSLSSVVTVPSSSLGTQTYICNVNHKPSNTKVDKKVEPKSCDKTHTCPPCPAPELLGGPSVFLFPPKPKDTLMISRTPEVTCVVVDVSHEDPEVKFNWYVDGVEVHNAKTKPCEEQYGSTYRCVSVLTVLHQDWLNGKEYKCKVSNKALPAPIEKTISKAKGQPREPQVYTLPPSREEMTKNQVSLTCLVKGFYPSDIAVEWESNGQPENNYKTTPPVLDSDGSFFLYSKLTVDKSRWQQGNVFSCSVMHEALHNHYTQKSLSLSPGK

SEQ ID NO: 474 - protein, 451 aa, synthetic construct
  REGION 1..451: note = source = /note="Description of Artificial Sequence: Synthetic polypeptide"
QVQLVESGGGVVQPGRSLRLSCAASGFTFSYFGMHWVRQAPGKGLEWVAVIWYDGSNKYYADSVKGRFTISRDNSKNTLYLQMNSLRAEDTAVYYCARDGTIFGVLLGDYWGQGTLVTVSSASTKGPSVFPLAPSSKSTSGGTAALGCLVKDYFPEPVTVSWNSGALTSGVHTFPAVLQSSGLYSLSSVVTVPSSSLGTQTYICNVNHKPSNTKVDKKVEPKSCDKTHTCPPCPAPELLGGPSVFLFPPKPKDTLMISRTPEVTCVVVDVSHEDPEVKFNWYVDGVEVHNAKTKPCEEQYGSTYRCVSVLTVLHQDWLNGKEYKCKVSNKALPAPIEKTISKAKGQPREPQVYTLPPSREEMTKNQVSLTCLVKGFYPSDIAVEWESNGQPENNYKTTPPVLDSDGSFFLYSKLTVDKSRWQQGNVFSCSVMHEALHNHYTQKSLSLSPGK

SEQ ID NO: 475 - protein, 450 aa, synthetic construct
  REGION 1..450: note = source = /note="Description of Artificial Sequence: Synthetic polypeptide"
QVQLVESGGGVVQPGRSLRLSCAASGFTFSSYGMHWVRQAPGKGLEWVAVIWYDGSNKYYADSVKGRFTISSDNSKNTLYLQMNSLRAEDTAVYYCARDRTIFGVVLDYWGQGTLVTVSSASTKGPSVFPLAPSSKSTSGGTAALGCLVKDYFPEPVTVSWNSGALTSGVHTFPAVLQSSGLYSLSSVVTVPSSSLGTQTYICNVNHKPSNTKVDKKVEPKSCDKTHTCPPCPAPELLGGPSVFLFPPKPKDTLMISRTPEVTCVVVDVSHEDPEVKFNWYVDGVEVHNAKTKPCEEQYGSTYRCVSVLTVLHQDWLNGKEYKCKVSNKALPAPIEKTISKAKGQPREPQVYTLPPSREEMTKNQVSLTCLVKGFYPSDIAVEWESNGQPENNYKTTPPVLDSDGSFFLYSKLTVDKSRWQQGNVFSCSVMHEALHNHYTQKSLSLSPGK

SEQ ID NO: 476 - protein, 453 aa, synthetic construct
  REGION 1..453: note = source = /note="Description of Artificial Sequence: Synthetic polypeptide"
QVPLVQSGAEVKKPGASVKVSCKASGYTFTGYYIHWVRQAPGQGLEWMGWINPDSGGTDYSQRFQGRFTMTRDTSISTAYMELNRLRSDDTAVYYCAREATIFGMVIVPFDYWGQGTLVTVSSASTKGPSVFPLAPSSKSTSGGTAALGCLVKDYFPEPVTVSWNSGALTSGVHTFPAVLQSSGLYSLSSVVTVPSSSLGTQTYICNVNHKPSNTKVDKKVEPKSCDKTHTCPPCPAPELLGGPSVFLFPPKPKDTLMISRTPEVTCVVVDVSHEDPEVKFNWYVDGVEVHNAKTKPCEEQYGSTYRCVSVLTVLHQDWLNGKEYKCKVSNKALPAPIEKTISKAKGQPREPQVYTLPPSREEMTKNQVSLTCLVKGFYPSDIAVEWESNGQPENNYKTTPPVLDSDGSFFLYSKLTVDKSRWQQGNVFSCSVMHEALHNHYTQKSLSLSPGK

SEQ ID NO: 477 - protein, 453 aa, synthetic construct
  REGION 1..453: note = source = /note="Description of Artificial Sequence: Synthetic polypeptide"
QVPLVQSGAEVKKPGASVKVSCKASGYTFTGYYIHWVRQAPGQGLEWMGWINPDSGGTDYSQRFQGRFTMTRDTSISTAYMELSRLRSDDTAVYYCAREATIFGMVIVPFDYWGQGTLVTVSSASTKGPSVFPLAPSSKSTSGGTAALGCLVKDYFPEPVTVSWNSGALTSGVHTFPAVLQSSGLYSLSSVVTVPSSSLGTQTYICNVNHKPSNTKVDKKVEPKSCDKTHTCPPCPAPELLGGPSVFLFPPKPKDTLMISRTPEVTCVVVDVSHEDPEVKFNWYVDGVEVHNAKTKPCEEQYGSTYRCVSVLTVLHQDWLNGKEYKCKVSNKALPAPIEKTISKAKGQPREPQVYTLPPSREEMTKNQVSLTCLVKGFYPSDIAVEWESNGQPENNYKTTPPVLDSDGSFFLYSKLTVDKSRWQQGNVFSCSVMHEALHNHYTQKSLSLSPGK

SEQ ID NO: 478 - protein, 453 aa, synthetic construct
  REGION 1..453: note = source = /note="Description of Artificial Sequence: Synthetic polypeptide"
QVPLVQSGAEVKKPGASVKVSCKASGYTFTGYYIHWVRQAPGQGLVWMGWISPNSGDTSYAQKFQDRVTMTRDTSISTAYMELSRLRSDDTAVYFCTREATIFGMLIVPFDYWGQGTLVTVSSASTKGPSVFPLAPSSKSTSGGTAALGCLVKDYFPEPVTVSWNSGALTSGVHTFPAVLQSSGLYSLSSVVTVPSSSLGTQTYICNVNHKPSNTKVDKKVEPKSCDKTHTCPPCPAPELLGGPSVFLFPPKPKDTLMISRTPEVTCVVVDVSHEDPEVKFNWYVDGVEVHNAKTKPCEEQYGSTYRCVSVLTVLHQDWLNGKEYKCKVSNKALPAPIEKTISKAKGQPREPQVYTLPPSREEMTKNQVSLTCLVKGFYPSDIAVEWESNGQPENNYKTTPPVLDSDGSFFLYSKLTVDKSRWQQGNVFSCSVMHEALHNHYTQKSLSLSPGK

SEQ ID NO: 479 - protein, 453 aa, synthetic construct
  REGION 1..453: note = source = /note="Description of Artificial Sequence: Synthetic polypeptide"
QVPLVQSGAEVKKPGASVKVSCKASGYTFTGYYIHWVRQAPGQGLEWMGWISPNNGDTNYAQKFQDRVTMTRDTSISTAYMELSRLRSDDTAVYYCTREATIFGMLIVPFDYWGQGTLVTVSSASTKGPSVFPLAPSSKSTSGGTAALGCLVKDYFPEPVTVSWNSGALTSGVHTFPAVLQSSGLYSLSSVVTVPSSSLGTQTYICNVNHKPSNTKVDKKVEPKSCDKTHTCPPCPAPELLGGPSVFLFPPKPKDTLMISRTPEVTCVVVDVSHEDPEVKFNWYVDGVEVHNAKTKPCEEQYGSTYRCVSVLTVLHQDWLNGKEYKCKVSNKALPAPIEKTISKAKGQPREPQVYTLPPSREEMTKNQVSLTCLVKGFYPSDIAVEWESNGQPENNYKTTPPVLDSDGSFFLYSKLTVDKSRWQQGNVFSCSVMHEALHNHYTQKSLSLSPGK

SEQ ID NO: 480 - protein, 456 aa, synthetic construct
  REGION 1..456: note = source = /note="Description of Artificial Sequence: Synthetic polypeptide"
QVQLQESGPGLVKPSQTLSLTCTVSGDSISSGGYYWSWIRQHPGKGLEWIGYIYYSGSTYYNPSLKSRVTISVDTSKNQFSLKLSSVTAADTAVYYCARDRITIFGVVMGGGMDVWGQGTTVTVSSASTKGPSVFPLAPSSKSTSGGTAALGCLVKDYFPEPVTVSWNSGALTSGVHTFPAVLQSSGLYSLSSVVTVPSSSLGTQTYICNVNHKPSNTKVDKKVEPKSCDKTHTCPPCPAPELLGGPSVFLFPPKPKDTLMISRTPEVTCVVVDVSHEDPEVKFNWYVDGVEVHNAKTKPCEEQYGSTYRCVSVLTVLHQDWLNGKEYKCKVSNKALPAPIEKTISKAKGQPREPQVYTLPPSREEMTKNQVSLTCLVKGFYPSDIAVEWESNGQPENNYKTTPPVLDSDGSFFLYSKLTVDKSRWQQGNVFSCSVMHEALHNHYTQKSLSLSPGK

SEQ ID NO: 481 - protein, 450 aa, synthetic construct
  REGION 1..450: note = source = /note="Description of Artificial Sequence: Synthetic polypeptide"
QVQLVESGGGVVQPGRSLRLSCAASGFTFSNYGMHWVRQAPGEGLEWVAAIWFDGSDKYYADSVKGRFTISRDNSKNTLYLQMNSLRAEDTAVYYCARDQAIFGVVPDYWGQGTLVTVSSASTKGPSVFPLAPSSKSTSGGTAALGCLVKDYFPEPVTVSWNSGALTSGVHTFPAVLQSSGLYSLSSVVTVPSSSLGTQTYICNVNHKPSNTKVDKKVEPKSCDKTHTCPPCPAPELLGGPSVFLFPPKPKDTLMISRTPEVTCVVVDVSHEDPEVKFNWYVDGVEVHNAKTKPCEEQYGSTYRCVSVLTVLHQDWLNGKEYKCKVSNKALPAPIEKTISKAKGQPREPQVYTLPPSREEMTKNQVSLTCLVKGFYPSDIAVEWESNGQPENNYKTTPPVLDSDGSFFLYSKLTVDKSRWQQGNVFSCSVMHEALHNHYTQKSLSLSPGK

SEQ ID NO: 482 - protein, 451 aa, synthetic construct; identical to SEQ ID NO: 474
  REGION 1..451: note = source = /note="Description of Artificial Sequence: Synthetic polypeptide"

SEQ ID NO: 483 - protein, 450 aa, synthetic construct
  REGION 1..450: note = source = /note="Description of Artificial Sequence: Synthetic polypeptide"
QVQLVESGGGVVQPGRSLRLSCAASGFSFSSYGMHWVRQPPGKGLEWVAAIWYDGNNKYYADSVKGRFTISRDSSKNTLYLQMNSLRAEDTAVYYCARDRTIFGVVLEYLGQGTLVTVSSASTKGPSVFPLAPSSKSTSGGTAALGCLVKDYFPEPVTVSWNSGALTSGVHTFPAVLQSSGLYSLSSVVTVPSSSLGTQTYICNVNHKPSNTKVDKKVEPKSCDKTHTCPPCPAPELLGGPSVFLFPPKPKDTLMISRTPEVTCVVVDVSHEDPEVKFNWYVDGVEVHNAKTKPCEEQYGSTYRCVSVLTVLHQDWLNGKEYKCKVSNKALPAPIEKTISKAKGQPREPQVYTLPPSREEMTKNQVSLTCLVKGFYPSDIAVEWESNGQPENNYKTTPPVLDSDGSFFLYSKLTVDKSRWQQGNVFSCSVMHEALHNHYTQKSLSLSPGK

SEQ ID NO: 484 - protein, 447 aa, synthetic construct
  REGION 1..447: note = source = /note="Description of Artificial Sequence: Synthetic polypeptide"
QVQLQESGPGLVKPSETLSLTCTVSQGSISSYYWSWIRQPAGKGLEWIGRIYTSGSTNYNPSLKSRVTMSIDTSKNQFSLKLNSVTAADTAVYYCARDVAVAGFDYWGQGTLVTVSSASTKGPSVFPLAPSSKSTSGGTAALGCLVKDYFPEPVTVSWNSGALTSGVHTFPAVLQSSGLYSLSSVVTVPSSSLGTQTYICNVNHKPSNTKVDKKVEPKSCDKTHTCPPCPAPELLGGPSVFLFPPKPKDTLMISRTPEVTCVVVDVSHEDPEVKFNWYVDGVEVHNAKTKPCEEQYGSTYRCVSVLTVLHQDWLNGKEYKCKVSNKALPAPIEKTISKAKGQPREPQVYTLPPSREEMTKNQVSLTCLVKGFYPSDIAVEWESNGQPENNYKTTPPVLDSDGSFFLYSKLTVDKSRWQQGNVFSCSVMHEALHNHYTQKSLSLSPGK

SEQ ID NO: 485 - protein, 447 aa, synthetic construct
  REGION 1..447: note = source = /note="Description of Artificial Sequence: Synthetic polypeptide"
QVQLQESGPGLVKPSETLSLTCTVSGGSISSYYWSWIRQPAGKGLEWIGRIYTSGSTNYNPSLKSRVTMSIDTSKNQFSLKLNSVTAADTAVYYCARDVAVAGFDYWGQGTLVTVSSASTKGPSVFPLAPSSKSTSGGTAALGCLVKDYFPEPVTVSWNSGALTSGVHTFPAVLQSSGLYSLSSVVTVPSSSLGTQTYICNVNHKPSNTKVDKKVEPKSCDKTHTCPPCPAPELLGGPSVFLFPPKPKDTLMISRTPEVTCVVVDVSHEDPEVKFNWYVDGVEVHNAKTKPCEEQYGSTYRCVSVLTVLHQDWLNGKEYKCKVSNKALPAPIEKTISKAKGQPREPQVYTLPPSREEMTKNQVSLTCLVKGFYPSDIAVEWESNGQPENNYKTTPPVLDSDGSFFLYSKLTVDKSRWQQGNVFSCSVMHEALHNHYTQKSLSLSPGK

SEQ ID NO: 486 - protein, 451 aa, synthetic construct
  REGION 1..451: note = source = /note="Description of Artificial Sequence: Synthetic polypeptide"
QVQLVESGGGVVQPGRSLRLSCAASGFTFSYFGMHWVRQAPGKGLEWVAVIWYDASNKYYADAVKGRFTISRDNSKNTLYLQMNSLRAEDTAVYYCARDGTIFGVLLGDYWGQGTLVTVSSASTKGPSVFPLAPSSKSTSGGTAALGCLVKDYFPEPVTVSWNSGALTSGVHTFPAVLQSSGLYSLSSVVTVPSSSLGTQTYICNVNHKPSNTKVDKKVEPKSCDKTHTCPPCPAPELLGGPSVFLFPPKPKDTLMISRTPEVTCVVVDVSHEDPEVKFNWYVDGVEVHNAKTKPCEEQYGSTYRCVSVLTVLHQDWLNGKEYKCKVSNKALPAPIEKTISKAKGQPREPQVYTLPPSREEMTKNQVSLTCLVKGFYPSDIAVEWESNGQPENNYKTTPPVLDSDGSFFLYSKLTVDKSRWQQGNVFSCSVMHEALHNHYTQKSLSLSPGK

SEQ ID NO: 487 - protein, 451 aa, synthetic construct
  REGION 1..451: note = source = /note="Description of Artificial Sequence: Synthetic polypeptide"
QVQLVESGGGVVQPGRSLRLSCAASGFTFSYFGMHWVRQAPGKGLEWVAVIWYDASNKYYADSVKGRFTISRDNSKNTLYLQMNSLRAEDTAVYYCARDGTIFGVLLGDYWGQGTLVTVSSASTKGPSVFPLAPSSKSTSGGTAALGCLVKDYFPEPVTVSWNSGALTSGVHTFPAVLQSSGLYSLSSVVTVPSSSLGTQTYICNVNHKPSNTKVDKKVEPKSCDKTHTCPPCPAPELLGGPSVFLFPPKPKDTLMISRTPEVTCVVVDVSHEDPEVKFNWYVDGVEVHNAKTKPCEEQYGSTYRCVSVLTVLHQDWLNGKEYKCKVSNKALPAPIEKTISKAKGQPREPQVYTLPPSREEMTKNQVSLTCLVKGFYPSDIAVEWESNGQPENNYKTTPPVLDSDGSFFLYSKLTVDKSRWQQGNVFSCSVMHEALHNHYTQKSLSLSPGK

SEQ ID NO: 488 - protein, 451 aa, synthetic construct
  REGION 1..451: note = source = /note="Description of Artificial Sequence: Synthetic polypeptide"
QVQLVESGGGVVQPGRSLRLSCAASGFTFSYFGMHWVRQAPGKGLEWVAVIWYDGSNKYYADAVKGRFTISRDNSKNTLYLQMNSLRAEDTAVYYCARDGTIFGVLLGDYWGQGTLVTVSSASTKGPSVFPLAPSSKSTSGGTAALGCLVKDYFPEPVTVSWNSGALTSGVHTFPAVLQSSGLYSLSSVVTVPSSSLGTQTYICNVNHKPSNTKVDKKVEPKSCDKTHTCPPCPAPELLGGPSVFLFPPKPKDTLMISRTPEVTCVVVDVSHEDPEVKFNWYVDGVEVHNAKTKPCEEQYGSTYRCVSVLTVLHQDWLNGKEYKCKVSNKALPAPIEKTISKAKGQPREPQVYTLPPSREEMTKNQVSLTCLVKGFYPSDIAVEWESNGQPENNYKTTPPVLDSDGSFFLYSKLTVDKSRWQQGNVFSCSVMHEALHNHYTQKSLSLSPGK

SEQ ID NO: 489 - protein, 451 aa, synthetic construct; identical to SEQ ID NO: 486
  REGION 1..451: note = source = /note="Description of Artificial Sequence: Synthetic polypeptide"

SEQ ID NO: 490 - protein, 451 aa, synthetic construct; identical to SEQ ID NO: 486
  REGION 1..451: note = source = /note="Description of Artificial Sequence: Synthetic polypeptide"

SEQ ID NO: 491 - protein, 451 aa, synthetic construct
  REGION 1..451: note = source = /note="Description of Artificial Sequence: Synthetic polypeptide"
QVQLVESGGGVVQPGRSLRLSCAASGFTFSYFGMHWVRQAPGKGLEWVAVIWYDASNKYYADAVKGRFTISRDNSKNTLYLQMNSLRAEDTAVYYCARDRTIFGVLLGDYWGQGTLVTVSSASTKGPSVFPLAPSSKSTSGGTAALGCLVKDYFPEPVTVSWNSGALTSGVHTFPAVLQSSGLYSLSSVVTVPSSSLGTQTYICNVNHKPSNTKVDKKVEPKSCDKTHTCPPCPAPELLGGPSVFLFPPKPKDTLMISRTPEVTCVVVDVSHEDPEVKFNWYVDGVEVHNAKTKPCEEQYGSTYRCVSVLTVLHQDWLNGKEYKCKVSNKALPAPIEKTISKAKGQPREPQVYTLPPSREEMTKNQVSLTCLVKGFYPSDIAVEWESNGQPENNYKTTPPVLDSDGSFFLYSKLTVDKSRWQQGNVFSCSVMHEALHNHYTQKSLSLSPGK

SEQ ID NO: 492 - protein, 451 aa, synthetic construct
  REGION 1..451: note = source = /note="Description of Artificial Sequence: Synthetic polypeptide"
QVQLVESGGGVVQPGRSLRLSCAASGFTFSNFGMHWVRQAPGKGLEWVAVIWYDASNENYADAVKGRFTISRDNSKNTLYLQMNSLRVADTAVYYCARDGTIFGVVLGDYWGQGTLVTVSSASTKGPSVFPLAPSSKSTSGGTAALGCLVKDYFPEPVTVSWNSGALTSGVHTFPAVLQSSGLYSLSSVVTVPSSSLGTQTYICNVNHKPSNTKVDKKVEPKSCDKTHTCPPCPAPELLGGPSVFLFPPKPKDTLMISRTPEVTCVVVDVSHEDPEVKFNWYVDGVEVHNAKTKPCEEQYGSTYRCVSVLTVLHQDWLNGKEYKCKVSNKALPAPIEKTISKAKGQPREPQVYTLPPSREEMTKNQVSLTCLVKGFYPSDIAVEWESNGQPENNYKTTPPVLDSDGSFFLYSKLTVDKSRWQQGNVFSCSVMHEALHNHYTQKSLSLSPGK

SEQ ID NO: 493 - protein, 451 aa, synthetic construct; identical to SEQ ID NO: 492
  REGION 1..451: note = source = /note="Description of Artificial Sequence: Synthetic polypeptide"

SEQ ID NO: 494 - protein, 451 aa, synthetic construct; identical to SEQ ID NO: 492
  REGION 1..451: note = source = /note="Description of Artificial Sequence: Synthetic polypeptide"

SEQ ID NO: 495 - protein, 451 aa, synthetic construct
  REGION 1..451: note = source = /note="Description of Artificial Sequence: Synthetic polypeptide"
QVQLVESGGGVVQPGRSLRLSCAASGFTFSNFGMHWVRQAPGKGLEWVAVIWYDASNENYADSVKGRFTISRDNSKNTLYLHMNSLRVADTAVYYCARDGTIFGVVLGDYWGQGTLVTVSSASTKGPSVFPLAPSSKSTSGGTAALGCLVKDYFPEPVTVSWNSGALTSGVHTFPAVLQSSGLYSLSSVVTVPSSSLGTQTYICNVNHKPSNTKVDKKVEPKSCDKTHTCPPCPAPELLGGPSVFLFPPKPKDTLMISRTPEVTCVVVDVSHEDPEVKFNWYVDGVEVHNAKTKPCEEQYGSTYRCVSVLTVLHQDWLNGKEYKCKVSNKALPAPIEKTISKAKGQPREPQVYTLPPSREEMTKNQVSLTCLVKGFYPSDIAVEWESNGQPENNYKTTPPVLDSDGSFFLYSKLTVDKSRWQQGNVFSCSVMHEALHNHYTQKSLSLSPGK

SEQ ID NO: 496 - protein, 451 aa, synthetic construct
  REGION 1..451: note = source = /note="Description of Artificial Sequence: Synthetic polypeptide"
QVQLVESGGGVVQPGRSLRLSCAASGFTFSNFGMHWVRQAPGKGLEWVAVIWYDGSNENYADAVKGRFTISRDNSKNTLYLHMNSLRVADTAVYYCARDGTIFGVVLGDYWGQGTLVTVSSASTKGPSVFPLAPSSKSTSGGTAALGCLVKDYFPEPVTVSWNSGALTSGVHTFPAVLQSSGLYSLSSVVTVPSSSLGTQTYICNVNHKPSNTKVDKKVEPKSCDKTHTCPPCPAPELLGGPSVFLFPPKPKDTLMISRTPEVTCVVVDVSHEDPEVKFNWYVDGVEVHNAKTKPCEEQYGSTYRCVSVLTVLHQDWLNGKEYKCKVSNKALPAPIEKTISKAKGQPREPQVYTLPPSREEMTKNQVSLTCLVKGFYPSDIAVEWESNGQPENNYKTTPPVLDSDGSFFLYSKLTVDKSRWQQGNVFSCSVMHEALHNHYTQKSLSLSPGK

SEQ ID NO: 497 - protein, 451 aa, synthetic construct
  REGION 1..451: note = source = /note="Description of Artificial Sequence: Synthetic polypeptide"
QVQLVESGGGVVQPGRSLRLSCAASGFTFSNFGMHWVRQAPGKGLEWVAVIWYDASNENYADAVKGRFTISRDNSKNTLYLQMNSLRVEDTAVYYCARDRTIFGVVLGDYWGQGTLVTVSSASTKGPSVFPLAPSSKSTSGGTAALGCLVKDYFPEPVTVSWNSGALTSGVHTFPAVLQSSGLYSLSSVVTVPSSSLGTQTYICNVNHKPSNTKVDKKVEPKSCDKTHTCPPCPAPELLGGPSVFLFPPKPKDTLMISRTPEVTCVVVDVSHEDPEVKFNWYVDGVEVHNAKTKPCEEQYGSTYRCVSVLTVLHQDWLNGKEYKCKVSNKALPAPIEKTISKAKGQPREPQVYTLPPSREEMTKNQVSLTCLVKGFYPSDIAVEWESNGQPENNYKTTPPVLDSDGSFFLYSKLTVDKSRWQQGNVFSCSVMHEALHNHYTQKSLSLSPGK

SEQ ID NO: 498 - protein, 451 aa, synthetic construct
  REGION 1..451: note = source = /note="Description of Artificial Sequence: Synthetic polypeptide"
QVQLVESGGGVVQPGRSLRLSCAASGFTFSNFGMHWVRQAPGKGLEWVAVIWYDASNENYADAVKGRFTISRDNSKNTLYLQMNSLRVEDTAVYYCARDGTIFGVVLGDYWGQGTLVTVSSASTKGPSVFPLAPSSKSTSGGTAALGCLVKDYFPEPVTVSWNSGALTSGVHTFPAVLQSSGLYSLSSVVTVPSSSLGTQTYICNVNHKPSNTKVDKKVEPKSCDKTHTCPPCPAPELLGGPSVFLFPPKPKDTLMISRTPEVTCVVVDVSHEDPEVKFNWYVDGVEVHNAKTKPCEEQYGSTYRCVSVLTVLHQDWLNGKEYKCKVSNKALPAPIEKTISKAKGQPREPQVYTLPPSREEMTKNQVSLTCLVKGFYPSDIAVEWESNGQPENNYKTTPPVLDSDGSFFLYSKLTVDKSRWQQGNVFSCSVMHEALHNHYTQKSLSLSPGK

SEQ ID NO: 499 - protein, 451 aa, synthetic construct
  REGION 1..451: note = source = /note="Description of Artificial Sequence: Synthetic polypeptide"
QVQLVESGGGVVQPGRSLRLSCAASGFTFSNFGMHWVRQAPGKGLEWVAVIWYDGSNENYADSVKGRFTISRDNSKNTLYLHMNSLRAADTAVYYCARDGTIFGVVLGDYWGQGTLVTVSSASTKGPSVFPLAPSSKSTSGGTAALGCLVKDYFPEPVTVSWNSGALTSGVHTFPAVLQSSGLYSLSSVVTVPSSSLGTQTYICNVNHKPSNTKVDKKVEPKSCDKTHTCPPCPAPELLGGPSVFLFPPKPKDTLMISRTPEVTCVVVDVSHEDPEVKFNWYVDGVEVHNAKTKPCEEQYGSTYRCVSVLTVLHQDWLNGKEYKCKVSNKALPAPIEKTISKAKGQPREPQVYTLPPSREEMTKNQVSLTCLVKGFYPSDIAVEWESNGQPENNYKTTPPVLDSDGSFFLYSKLTVDKSRWQQGNVFSCSVMHEALHNHYTQKSLSLSPGK

SEQ ID NO: 500 - protein, 451 aa, synthetic construct
  REGION 1..451: note = source = /note="Description of Artificial Sequence: Synthetic polypeptide"
QVQLVESGGGVVQPGRSLRLSCAASGFTFSNFGMHWVRQAPGKGLEWVAVIWYDASNENYADAVKGRFTISRDNSKNTLYLQMNSLRAADTAVYYCARDGTIFGVVLGDYWGQGTLVTVSSASTKGPSVFPLAPSSKSTSGGTAALGCLVKDYFPEPVTVSWNSGALTSGVHTFPAVLQSSGLYSLSSVVTVPSSSLGTQTYICNVNHKPSNTKVDKKVEPKSCDKTHTCPPCPAPELLGGPSVFLFPPKPKDTLMISRTPEVTCVVVDVSHEDPEVKFNWYVDGVEVHNAKTKPCEEQYGSTYRCVSVLTVLHQDWLNGKEYKCKVSNKALPAPIEKTISKAKGQPREPQVYTLPPSREEMTKNQVSLTCLVKGFYPSDIAVEWESNGQPENNYKTTPPVLDSDGSFFLYSKLTVDKSRWQQGNVFSCSVMHEALHNHYTQKSLSLSPGK

SEQ ID NO: 501 - protein, 451 aa, synthetic construct
  REGION 1..451: note = source = /note="Description of Artificial Sequence: Synthetic polypeptide"
QVQLVESGGGVVQPGRSLRLSCAASGFTFSNFGMHWVRQAPGKGLEWVAVIWYDASNENYADAVKGRFTISRDNSKNTLYLHMNSLRAADTAVYYCARDGTIFGVVLGDYWGQGTLVTVSSASTKGPSVFPLAPSSKSTSGGTAALGCLVKDYFPEPVTVSWNSGALTSGVHTFPAVLQSSGLYSLSSVVTVPSSSLGTQTYICNVNHKPSNTKVDKKVEPKSCDKTHTCPPCPAPELLGGPSVFLFPPKPKDTLMISRTPEVTCVVVDVSHEDPEVKFNWYVDGVEVHNAKTKPCEEQYGSTYRCVSVLTVLHQDWLNGKEYKCKVSNKALPAPIEKTISKAKGQPREPQVYTLPPSREEMTKNQVSLTCLVKGFYPSDIAVEWESNGQPENNYKTTPPVLDSDGSFFLYSKLTVDKSRWQQGNVFSCSVMHEALHNHYTQKSLSLSPGK

SEQ ID NO: 502 - protein, 451 aa, synthetic construct; identical to SEQ ID NO: 500
  REGION 1..451: note = source = /note="Description of Artificial Sequence: Synthetic polypeptide"

SEQ ID NO: 503 - protein, 451 aa, synthetic construct; identical to SEQ ID NO: 500
  REGION 1..451: note = source = /note="Description of Artificial Sequence: Synthetic polypeptide"

SEQ ID NO: 504 - protein, 451 aa, synthetic construct; identical to SEQ ID NO: 501
  REGION 1..451: note = source = /note="Description of Artificial Sequence: Synthetic polypeptide"

SEQ ID NO: 505 - protein, 451 aa, synthetic construct; identical to SEQ ID NO: 501
  REGION 1..451: note = source = /note="Description of Artificial Sequence: Synthetic polypeptide"

SEQ ID NO: 506 - protein, 451 aa, synthetic construct; identical to SEQ ID NO: 500
  REGION 1..451: note = source = /note="Description of Artificial Sequence: Synthetic polypeptide"

SEQ ID NO: 507 - protein, 451 aa, synthetic construct
  REGION 1..451: note = source = /note="Description of Artificial Sequence: Synthetic polypeptide"
QVQLVESGGGVVQPGRSLRLSCAASGFTFSNFGMHWVRQAPGKGLEWVAVIWYDGSNENYADAVKGRFTISRDNSKNTLYLQMNSLRAADTAVYYCARDGTIFGVVLGDYWGQGTLVTVSSASTKGPSVFPLAPSSKSTSGGTAALGCLVKDYFPEPVTVSWNSGALTSGVHTFPAVLQSSGLYSLSSVVTVPSSSLGTQTYICNVNHKPSNTKVDKKVEPKSCDKTHTCPPCPAPELLGGPSVFLFPPKPKDTLMISRTPEVTCVVVDVSHEDPEVKFNWYVDGVEVHNAKTKPCEEQYGSTYRCVSVLTVLHQDWLNGKEYKCKVSNKALPAPIEKTISKAKGQPREPQVYTLPPSREEMTKNQVSLTCLVKGFYPSDIAVEWESNGQPENNYKTTPPVLDSDGSFFLYSKLTVDKSRWQQGNVFSCSVMHEALHNHYTQKSLSLSPGK

SEQ ID NO: 508 - protein, 451 aa, synthetic construct
  REGION 1..451: note = source = /note="Description of Artificial Sequence: Synthetic polypeptide"
QVQLVESGGGVVQPGRSLRLSCAASGFTFSNFGMHWVRQAPGKGLEWVAVIWYDASNENYADSVKGRFTISRDNSKNTLYLQMNSLRAADTAVYYCARDGTIFGVVLGDYWGQGTLVTVSSASTKGPSVFPLAPSSKSTSGGTAALGCLVKDYFPEPVTVSWNSGALTSGVHTFPAVLQSSGLYSLSSVVTVPSSSLGTQTYICNVNHKPSNTKVDKKVEPKSCDKTHTCPPCPAPELLGGPSVFLFPPKPKDTLMISRTPEVTCVVVDVSHEDPEVKFNWYVDGVEVHNAKTKPCEEQYGSTYRCVSVLTVLHQDWLNGKEYKCKVSNKALPAPIEKTISKAKGQPREPQVYTLPPSREEMTKNQVSLTCLVKGFYPSDIAVEWESNGQPENNYKTTPPVLDSDGSFFLYSKLTVDKSRWQQGNVFSCSVMHEALHNHYTQKSLSLSPGK

SEQ ID NO: 509 - protein, 451 aa, synthetic construct
  REGION 1..451: note = source = /note="Description of Artificial Sequence: Synthetic polypeptide"
QVQLVESGGGVVQPGRSLRLSCAASGFTFSNFGMHWVRQAPGKGLEWVAVIWYDASNENYADAVKGRFTISRDNSKNTLYLQMNSLRAEDTAVYYCARDRTIFGVVLGDYWGQGTLVTVSSASTKGPSVFPLAPSSKSTSGGTAALGCLVKDYFPEPVTVSWNSGALTSGVHTFPAVLQSSGLYSLSSVVTVPSSSLGTQTYICNVNHKPSNTKVDKKVEPKSCDKTHTCPPCPAPELLGGPSVFLFPPKPKDTLMISRTPEVTCVVVDVSHEDPEVKFNWYVDGVEVHNAKTKPCEEQYGSTYRCVSVLTVLHQDWLNGKEYKCKVSNKALPAPIEKTISKAKGQPREPQVYTLPPSREEMTKNQVSLTCLVKGFYPSDIAVEWESNGQPENNYKTTPPVLDSDGSFFLYSKLTVDKSRWQQGNVFSCSVMHEALHNHYTQKSLSLSPGK

SEQ ID NO: 510 - protein, 451 aa, synthetic construct
  REGION 1..451: note = source = /note="Description of Artificial Sequence: Synthetic polypeptide"
QVQLVESGGGVVQPGRSLRLSCAASGFTFSNFGMHWVRQAPGKGLEWVAVIWYDASNENYADAVKGRFTISRDNSKNTLYLQMNSLRAEDTAVYYCARDGTIFGVVLGDYWGQGTLVTVSSASTKGPSVFPLAPSSKSTSGGTAALGCLVKDYFPEPVTVSWNSGALTSGVHTFPAVLQSSGLYSLSSVVTVPSSSLGTQTYICNVNHKPSNTKVDKKVEPKSCDKTHTCPPCPAPELLGGPSVFLFPPKPKDTLMISRTPEVTCVVVDVSHEDPEVKFNWYVDGVEVHNAKTKPCEEQYGSTYRCVSVLTVLHQDWLNGKEYKCKVSNKALPAPIEKTISKAKGQPREPQVYTLPPSREEMTKNQVSLTCLVKGFYPSDIAVEWESNGQPENNYKTTPPVLDSDGSFFLYSKLTVDKSRWQQGNVFSCSVMHEALHNHYTQKSLSLSPGK

SEQ ID NO: 511 - protein, 450 aa, synthetic construct
  REGION 1..450: note = source = /note="Description of Artificial Sequence: Synthetic polypeptide"
QVQLVESGGGVVQPGRSLRLSCAASGFTFSSYGMHWVRQAPGKGLEWVAVIWYDASNKYYADAVKGRFTISRDNSKNTLYLQMNSLRAEDTAVYYCARDRTIFGVVLDYWGQGTLVTVSSASTKGPSVFPLAPSSKSTSGGTAALGCLVKDYFPEPVTVSWNSGALTSGVHTFPAVLQSSGLYSLSSVVTVPSSSLGTQTYICNVNHKPSNTKVDKKVEPKSCDKTHTCPPCPAPELLGGPSVFLFPPKPKDTLMISRTPEVTCVVVDVSHEDPEVKFNWYVDGVEVHNAKTKPCEEQYGSTYRCVSVLTVLHQDWLNGKEYKCKVSNKALPAPIEKTISKAKGQPREPQVYTLPPSREEMTKNQVSLTCLVKGFYPSDIAVEWESNGQPENNYKTTPPVLDSDGSFFLYSKLTVDKSRWQQGNVFSCSVMHEALHNHYTQKSLSLSPGK

SEQ ID NO: 512 - protein, 450 aa, synthetic construct
  REGION 1..450: note = source = /note="Description of Artificial Sequence: Synthetic polypeptide"
QVQLVESGGGVVQPGRSLRLSCAASGFTFSSYGMHWVRQAPGKGLEWVAVIWYDASNKYYADAVKGRFTISSDNSKNTLYLQMNSLRAEDTAVYYCARDRTIFGVVLDYWGQGTLVTVSSASTKGPSVFPLAPSSKSTSGGTAALGCLVKDYFPEPVTVSWNSGALTSGVHTFPAVLQSSGLYSLSSVVTVPSSSLGTQTYICNVNHKPSNTKVDKKVEPKSCDKTHTCPPCPAPELLGGPSVFLFPPKPKDTLMISRTPEVTCVVVDVSHEDPEVKFNWYVDGVEVHNAKTKPCEEQYGSTYRCVSVLTVLHQDWLNGKEYKCKVSNKALPAPIEKTISKAKGQPREPQVYTLPPSREEMTKNQVSLTCLVKGFYPSDIAVEWESNGQPENNYKTTPPVLDSDGSFFLYSKLTVDKSRWQQGNVFSCSVMHEALHNHYTQKSLSLSPGK

SEQ ID NO: 513 - protein, 450 aa, synthetic construct; identical to SEQ ID NO: 511
  REGION 1..450: note = source = /note="Description of Artificial Sequence: Synthetic polypeptide"

SEQ ID NO: 514 - protein, 450 aa, synthetic construct; identical to SEQ ID NO: 511
  REGION 1..450: note = source = /note="Description of Artificial Sequence: Synthetic polypeptide"

SEQ ID NO: 515 - protein, 450 aa, synthetic construct; identical to SEQ ID NO: 512
  REGION 1..450: note = source = /note="Description of Artificial Sequence: Synthetic polypeptide"

SEQ ID NO: 516 - protein, 450 aa, synthetic construct; identical to SEQ ID NO: 512
  REGION 1..450: note = source = /note="Description of Artificial Sequence: Synthetic polypeptide"

SEQ ID NO: 517 - protein, 450 aa, synthetic construct; identical to SEQ ID NO: 511
  REGION 1..450: note = source = /note="Description of Artificial Sequence: Synthetic polypeptide"

SEQ ID NO: 518 - protein, 450 aa, synthetic construct
  REGION 1..450: note = source = /note="Description of Artificial Sequence: Synthetic polypeptide"
QVQLVESGGGVVQPGRSLRLSCAASGFTFSSYGMHWVRQAPGKGLEWVAVIWYDASNKYYADSVKGRFTISRDNSKNTLYLQMNSLRAEDTAVYYCARDRTIFGVVLDYWGQGTLVTVSSASTKGPSVFPLAPSSKSTSGGTAALGCLVKDYFPEPVTVSWNSGALTSGVHTFPAVLQSSGLYSLSSVVTVPSSSLGTQTYICNVNHKPSNTKVDKKVEPKSCDKTHTCPPCPAPELLGGPSVFLFPPKPKDTLMISRTPEVTCVVVDVSHEDPEVKFNWYVDGVEVHNAKTKPCEEQYGSTYRCVSVLTVLHQDWLNGKEYKCKVSNKALPAPIEKTISKAKGQPREPQVYTLPPSREEMTKNQVSLTCLVKGFYPSDIAVEWESNGQPENNYKTTPPVLDSDGSFFLYSKLTVDKSRWQQGNVFSCSVMHEALHNHYTQKSLSLSPGK

SEQ ID NO: 519 - protein, 450 aa, synthetic construct
  REGION 1..450: note = source = /note="Description of Artificial Sequence: Synthetic polypeptide"
QVQLVESGGGVVQPGRSLRLSCAASGFTFSSYGMHWVRQAPGKGLEWVAVIWYDGSNKYYADAVKGRFTISRDNSKNTLYLQMNSLRAEDTAVYYCARDRTIFGVVLDYWGQGTLVTVSSASTKGPSVFPLAPSSKSTSGGTAALGCLVKDYFPEPVTVSWNSGALTSGVHTFPAVLQSSGLYSLSSVVTVPSSSLGTQTYICNVNHKPSNTKVDKKVEPKSCDKTHTCPPCPAPELLGGPSVFLFPPKPKDTLMISRTPEVTCVVVDVSHEDPEVKFNWYVDGVEVHNAKTKPCEEQYGSTYRCVSVLTVLHQDWLNGKEYKCKVSNKALPAPIEKTISKAKGQPREPQVYTLPPSREEMTKNQVSLTCLVKGFYPSDIAVEWESNGQPENNYKTTPPVLDSDGSFFLYSKLTVDKSRWQQGNVFSCSVMHEALHNHYTQKSLSLSPGK

SEQ ID NO: 520 - protein, 451 aa, synthetic construct; identical to SEQ ID NO: 486
  REGION 1..451: note = source = /note="Description of Artificial Sequence: Synthetic polypeptide"

SEQ ID NO: 521 - protein, 451 aa, synthetic construct; identical to SEQ ID NO: 491
  REGION 1..451: note = source = /note="Description of Artificial Sequence: Synthetic polypeptide"

SEQ ID NO: 522 - protein, 451 aa, synthetic construct; identical to SEQ ID NO: 486
  REGION 1..451: note = source = /note="Description of Artificial Sequence: Synthetic polypeptide"

SEQ ID NO: 523 - protein, 451 aa, synthetic construct; identical to SEQ ID NO: 491
  REGION 1..451: note = source = /note="Description of Artificial Sequence: Synthetic polypeptide"

SEQ ID NO: 524 - protein, 451 aa, synthetic construct; identical to SEQ ID NO: 474
  REGION 1..451: note = source = /note="Description of Artificial Sequence: Synthetic polypeptide"

SEQ ID NO: 525 - protein, 451 aa, synthetic construct; identical to SEQ ID NO: 487
  REGION 1..451: note = source = /note="Description of Artificial Sequence: Synthetic polypeptide"

SEQ ID NO: 526 - protein, 451 aa, synthetic construct; identical to SEQ ID NO: 488
  REGION 1..451: note = source = /note="Description of Artificial Sequence: Synthetic polypeptide"

SEQ ID NO: 527 - protein, 450 aa, synthetic construct
  REGION 1..450: note = source = /note="Description of Artificial Sequence: Synthetic polypeptide"
QVQLVESGGGVVQPGRSLRLSCAASGFSFSSYGMHWVRQPPGKGLEWVAAIWYDANNKYYADAVKGRFTISRDSSKNTLYLQMNSLRAEDTAVYYCARDRTIFGVVLEYWGQGTLVTVSSASTKGPSVFPLAPSSKSTSGGTAALGCLVKDYFPEPVTVSWNSGALTSGVHTFPAVLQSSGLYSLSSVVTVPSSSLGTQTYICNVNHKPSNTKVDKKVEPKSCDKTHTCPPCPAPELLGGPSVFLFPPKPKDTLMISRTPEVTCVVVDVSHEDPEVKFNWYVDGVEVHNAKTKPCEEQYGSTYRCVSVLTVLHQDWLNGKEYKCKVSNKALPAPIEKTISKAKGQPREPQVYTLPPSREEMTKNQVSLTCLVKGFYPSDIAVEWESNGQPENNYKTTPPVLDSDGSFFLYSKLTVDKSRWQQGNVFSCSVMHEALHNHYTQKSLSLSPGK

SEQ ID NO: 528 - protein, 450 aa, synthetic construct; identical to SEQ ID NO: 527
  REGION 1..450: note = source = /note="Description of Artificial Sequence: Synthetic polypeptide"

SEQ ID NO: 529 - protein, 450 aa, synthetic construct
  REGION 1..450: note = source = /note="Description of Artificial Sequence: Synthetic polypeptide"
QVQLVESGGGVVQPGRSLRLSCAASGFSFSSYGMHWVRQPPGKGLEWVAAIWYDANNKYYADAVKGRFTISRDSSKNTLYLQMNSLRAEDTAVYYCARDRTIFGVVLEYLGQGTLVTVSSASTKGPSVFPLAPSSKSTSGGTAALGCLVKDYFPEPVTVSWNSGALTSGVHTFPAVLQSSGLYSLSSVVTVPSSSLGTQTYICNVNHKPSNTKVDKKVEPKSCDKTHTCPPCPAPELLGGPSVFLFPPKPKDTLMISRTPEVTCVVVDVSHEDPEVKFNWYVDGVEVHNAKTKPCEEQYGSTYRCVSVLTVLHQDWLNGKEYKCKVSNKALPAPIEKTISKAKGQPREPQVYTLPPSREEMTKNQVSLTCLVKGFYPSDIAVEWESNGQPENNYKTTPPVLDSDGSFFLYSKLTVDKSRWQQGNVFSCSVMHEALHNHYTQKSLSLSPGK

SEQ ID NO: 530 - protein, 450 aa, synthetic construct; identical to SEQ ID NO: 527
  REGION 1..450: note = source = /note="Description of Artificial Sequence: Synthetic polypeptide"

SEQ ID NO: 531 - protein, 450 aa, synthetic construct; identical to SEQ ID NO: 529
  REGION 1..450: note = source = /note="Description of Artificial Sequence: Synthetic polypeptide"

SEQ ID NO: 532 - protein, 450 aa, synthetic construct; identical to SEQ ID NO: 529
  REGION 1..450: note = source = /note="Description of Artificial Sequence: Synthetic polypeptide"

SEQ ID NO: 533 - protein, 450 aa, synthetic construct; identical to SEQ ID NO: 527
  REGION 1..450: note = source = /note="Description of Artificial Sequence: Synthetic polypeptide"

SEQ ID NO: 534 - protein, 450 aa, synthetic construct
  REGION 1..450: note = source = /note="Description of Artificial Sequence: Synthetic polypeptide"
QVQLVESGGGVVQPGRSLRLSCAASGFSFSSYGMHWVRQPPGKGLEWVAAIWYDGNNKYYADAVKGRFTISRDSSKNTLYLQMNSLRAEDTAVYYCARDRTIFGVVLEYWGQGTLVTVSSASTKGPSVFPLAPSSKSTSGGTAALGCLVKDYFPEPVTVSWNSGALTSGVHTFPAVLQSSGLYSLSSVVTVPSSSLGTQTYICNVNHKPSNTKVDKKVEPKSCDKTHTCPPCPAPELLGGPSVFLFPPKPKDTLMISRTPEVTCVVVDVSHEDPEVKFNWYVDGVEVHNAKTKPCEEQYGSTYRCVSVLTVLHQDWLNGKEYKCKVSNKALPAPIEKTISKAKGQPREPQVYTLPPSREEMTKNQVSLTCLVKGFYPSDIAVEWESNGQPENNYKTTPPVLDSDGSFFLYSKLTVDKSRWQQGNVFSCSVMHEALHNHYTQKSLSLSPGK

SEQ ID NO: 535 - protein, 450 aa, synthetic construct
  REGION 1..450: note = source = /note="Description of Artificial Sequence: Synthetic polypeptide"
QVQLVESGGGVVQPGRSLRLSCAASGFSFSSYGMHWVRQPPGKGLEWVAAIWYDANNKYYADSVKGRFTISRDSSKNTLYLQMNSLRAEDTAVYYCARDRTIFGVVLEYWGQGTLVTVSSASTKGPSVFPLAPSSKSTSGGTAALGCLVKDYFPEPVTVSWNSGALTSGVHTFPAVLQSSGLYSLSSVVTVPSSSLGTQTYICNVNHKPSNTKVDKKVEPKSCDKTHTCPPCPAPELLGGPSVFLFPPKPKDTLMISRTPEVTCVVVDVSHEDPEVKFNWYVDGVEVHNAKTKPCEEQYGSTYRCVSVLTVLHQDWLNGKEYKCKVSNKALPAPIEKTISKAKGQPREPQVYTLPPSREEMTKNQVSLTCLVKGFYPSDIAVEWESNGQPENNYKTTPPVLDSDGSFFLYSKLTVDKSRWQQGNVFSCSVMHEALHNHYTQKSLSLSPGK

SEQ ID NO: 536 - protein, 450 aa, synthetic construct; identical to SEQ ID NO: 527
  REGION 1..450: note = source = /note="Description of Artificial Sequence: Synthetic polypeptide"

SEQ ID NO: 537 - protein, 450 aa, synthetic construct; identical to SEQ ID NO: 529
  REGION 1..450: note = source = /note="Description of Artificial Sequence: Synthetic polypeptide"

SEQ ID NO: 538 - protein, 450 aa, synthetic construct
  REGION 1..450: note = source = /note="Description of Artificial Sequence: Synthetic polypeptide"
QVQLVESGGGVVQPGRSLRLSCAASGFSFSSYGMHWVRQAPGKGLEWVAVIWYDASNKYYEDAVKGRFTISRDNSKNTLFLQVNSLRAEDTAVYYCARGITIFGHGFEYWGQGTLVTVSSASTKGPSVFPLAPSSKSTSGGTAALGCLVKDYFPEPVTVSWNSGALTSGVHTFPAVLQSSGLYSLSSVVTVPSSSLGTQTYICNVNHKPSNTKVDKKVEPKSCDKTHTCPPCPAPELLGGPSVFLFPPKPKDTLMISRTPEVTCVVVDVSHEDPEVKFNWYVDGVEVHNAKTKPCEEQYGSTYRCVSVLTVLHQDWLNGKEYKCKVSNKALPAPIEKTISKAKGQPREPQVYTLPPSREEMTKNQVSLTCLVKGFYPSDIAVEWESNGQPENNYKTTPPVLDSDGSFFLYSKLTVDKSRWQQGNVFSCSVMHEALHNHYTQKSLSLSPGK

SEQ ID NO: 539 - protein, 450 aa, synthetic construct
  REGION 1..450: note = source = /note="Description of Artificial Sequence: Synthetic polypeptide"
QVQLVESGGGVVQPGRSLRLSCAASGFSFSSYGMHWVRQAPGKGLEWVAVIWYDGSNKYYEDSVKGRFTISRDNSKNTLFLQVNSLRAEDTAVYYCARGITIFGHGFEYWGQGTLVTVSSASTKGPSVFPLAPSSKSTSGGTAALGCLVKDYFPEPVTVSWNSGALTSGVHTFPAVLQSSGLYSLSSVVTVPSSSLGTQTYICNVNHKPSNTKVDKKVEPKSCDKTHTCPPCPAPELLGGPSVFLFPPKPKDTLMISRTPEVTCVVVDVSHEDPEVKFNWYVDGVEVHNAKTKPCEEQYGSTYRCVSVLTVLHQDWLNGKEYKCKVSNKALPAPIEKTISKAKGQPREPQVYTLPPSREEMTKNQVSLTCLVKGFYPSDIAVEWESNGQPENNYKTTPPVLDSDGSFFLYSKLTVDKSRWQQGNVFSCSVMHEALHNHYTQKSLSLSPGK

SEQ ID NO: 540 - protein, 450 aa, synthetic construct
  REGION 1..450: note = source = /note="Description of Artificial Sequence: Synthetic polypeptide"
QVQLVESGGGVVQPGRSLRLSCAASGFSFSSYGMHWVRQAPGKGLEWVAVIWYDGSNKYYEDAVKGRFTISRDNSKNTLFLQVNSLRAEDTAVYYCARGITIFGHGFEYWGQGTLVTVSSASTKGPSVFPLAPSSKSTSGGTAALGCLVKDYFPEPVTVSWNSGALTSGVHTFPAVLQSSGLYSLSSVVTVPSSSLGTQTYICNVNHKPSNTKVDKKVEPKSCDKTHTCPPCPAPELLGGPSVFLFPPKPKDTLMISRTPEVTCVVVDVSHEDPEVKFNWYVDGVEVHNAKTKPCEEQYGSTYRCVSVLTVLHQDWLNGKEYKCKVSNKALPAPIEKTISKAKGQPREPQVYTLPPSREEMTKNQVSLTCLVKGFYPSDIAVEWESNGQPENNYKTTPPVLDSDGSFFLYSKLTVDKSRWQQGNVFSCSVMHEALHNHYTQKSLSLSPGK

SEQ ID NO: 541 - protein, 450 aa, synthetic construct
  REGION 1..450: note = source = /note="Description of Artificial Sequence: Synthetic polypeptide"
QVQLVESGGGVVQPGRSLRLSCAASGFSFSSYGMHWVRQAPGKGLEWVAVIWYDASNKYYEDSVKGRFTISRDNSKNTLFLQVNSLRAEDTAVYYCARGITIFGHGFEYWGQGTLVTVSSASTKGPSVFPLAPSSKSTSGGTAALGCLVKDYFPEPVTVSWNSGALTSGVHTFPAVLQSSGLYSLSSVVTVPSSSLGTQTYICNVNHKPSNTKVDKKVEPKSCDKTHTCPPCPAPELLGGPSVFLFPPKPKDTLMISRTPEVTCVVVDVSHEDPEVKFNWYVDGVEVHNAKTKPCEEQYGSTYRCVSVLTVLHQDWLNGKEYKCKVSNKALPAPIEKTISKAKGQPREPQVYTLPPSREEMTKNQVSLTCLVKGFYPSDIAVEWESNGQPENNYKTTPPVLDSDGSFFLYSKLTVDKSRWQQGNVFSCSVMHEALHNHYTQKSLSLSPGK

SEQ ID NO: 542 - protein, 450 aa, synthetic construct
  REGION 1..450: note = source = /note="Description of Artificial Sequence: Synthetic polypeptide"
QVQLVESGGGVVQPGRSLRLSCAASGFTFSNYGMHWVRQAPGEGLEWVAAIWFDASDKYYADAVKGRFTISRDNSKNTLYLQMNSLRAEDTAVYYCARDQAIFGVVPDYWGQGTLVTVSSASTKGPSVFPLAPSSKSTSGGTAALGCLVKDYFPEPVTVSWNSGALTSGVHTFPAVLQSSGLYSLSSVVTVPSSSLGTQTYICNVNHKPSNTKVDKKVEPKSCDKTHTCPPCPAPELLGGPSVFLFPPKPKDTLMISRTPEVTCVVVDVSHEDPEVKFNWYVDGVEVHNAKTKPCEEQYGSTYRCVSVLTVLHQDWLNGKEYKCKVSNKALPAPIEKTISKAKGQPREPQVYTLPPSREEMTKNQVSLTCLVKGFYPSDIAVEWESNGQPENNYKTTPPVLDSDGSFFLYSKLTVDKSRWQQGNVFSCSVMHEALHNHYTQKSLSLSPGK

SEQ ID NO: 543 - protein, 450 aa, synthetic construct
  REGION 1..450: note = source = /note="Description of Artificial Sequence: Synthetic polypeptide"
QVQLVESGGGVVQPGRSLRLSCAASGFTFSNYGMHWVRQAPGEGLEWVAAIWFDASDKYYADSVKGRFTISRDNSKNTLYLQMNSLRAEDTAVYYCARDQAIFGVVPDYWGQGTLVTVSSASTKGPSVFPLAPSSKSTSGGTAALGCLVKDYFPEPVTVSWNSGALTSGVHTFPAVLQSSGLYSLSSVVTVPSSSLGTQTYICNVNHKPSNTKVDKKVEPKSCDKTHTCPPCPAPELLGGPSVFLFPPKPKDTLMISRTPEVTCVVVDVSHEDPEVKFNWYVDGVEVHNAKTKPCEEQYGSTYRCVSVLTVLHQDWLNGKEYKCKVSNKALPAPIEKTISKAKGQPREPQVYTLPPSREEMTKNQVSLTCLVKGFYPSDIAVEWESNGQPENNYKTTPPVLDSDGSFFLYSKLTVDKSRWQQGNVFSCSVMHEALHNHYTQKSLSLSPGK

SEQ ID NO: 544 - protein, 450 aa, synthetic construct
  REGION 1..450: note = source = /note="Description of Artificial Sequence: Synthetic polypeptide"
QVQLVESGGGVVQPGRSLRLSCAASGFTFSNYGMHWVRQAPGEGLEWVAAIWFDGSDKYYADAVKGRFTISRDNSKNTLYLQMNSLRAEDTAVYYCARDQAIFGVVPDYWGQGTLVTVSSASTKGPSVFPLAPSSKSTSGGTAALGCLVKDYFPEPVTVSWNSGALTSGVHTFPAVLQSSGLYSLSSVVTVPSSSLGTQTYICNVNHKPSNTKVDKKVEPKSCDKTHTCPPCPAPELLGGPSVFLFPPKPKDTLMISRTPEVTCVVVDVSHEDPEVKFNWYVDGVEVHNAKTKPCEEQYGSTYRCVSVLTVLHQDWLNGKEYKCKVSNKALPAPIEKTISKAKGQPREPQVYTLPPSREEMTKNQVSLTCLVKGFYPSDIAVEWESNGQPENNYKTTPPVLDSDGSFFLYSKLTVDKSRWQQGNVFSCSVMHEALHNHYTQKSLSLSPGK

SEQ ID NO: 545 - protein, 450 aa, synthetic construct; identical to SEQ ID NO: 542
  REGION 1..450: note = source = /note="Description of Artificial Sequence: Synthetic polypeptide"

SEQ ID NO: 546 - protein, 450 aa, synthetic construct
  REGION 1..450: note = source = /note="Description of Artificial Sequence: Synthetic polypeptide"
QVQLVESGGGVVQPGRSLRLSCAASGFTFSNYGMHWVRQAPGKGLEWVAAIWFDASDKYYADAVKGRFTISRDNSKNTLYLQMNSLRAEDTAVYYCARDQAIFGVVPDYWGQGTLVTVSSASTKGPSVFPLAPSSKSTSGGTAALGCLVKDYFPEPVTVSWNSGALTSGVHTFPAVLQSSGLYSLSSVVTVPSSSLGTQTYICNVNHKPSNTKVDKKVEPKSCDKTHTCPPCPAPELLGGPSVFLFPPKPKDTLMISRTPEVTCVVVDVSHEDPEVKFNWYVDGVEVHNAKTKPCEEQYGSTYRCVSVLTVLHQDWLNGKEYKCKVSNKALPAPIEKTISKAKGQPREPQVYTLPPSREEMTKNQVSLTCLVKGFYPSDIAVEWESNGQPENNYKTTPPVLDSDGSFFLYSKLTVDKSRWQQGNVFSCSVMHEALHNHYTQKSLSLSPGK

SEQ ID NO: 547 - protein, 450 aa, synthetic construct; identical to SEQ ID NO: 546
  REGION 1..450: note = source = /note="Description of Artificial Sequence: Synthetic polypeptide"

SEQ ID NO: 548 - protein, 450 aa, synthetic construct; identical to SEQ ID NO: 542
  REGION 1..450: note = source = /note="Description of Artificial Sequence: Synthetic polypeptide"

SEQ ID NO: 549 - protein, 450 aa, synthetic construct; identical to SEQ ID NO: 546
  REGION 1..450: note = source = /note="Description of Artificial Sequence: Synthetic polypeptide"

SEQ ID NO: 550 - protein, 456 aa, synthetic construct
  REGION 1..456: note = source = /note="Description of Artificial Sequence: Synthetic polypeptide"
QVQLQESGPGLVKPSETLSLTCTVSGDSISSGGYYWSWIRQPPGKGLEWIGYIYYSGSTYYNPSLKSRVTISVDTSKNQFSLKLSSVTAADTAVYYCARDRITIFGVVMGGGMDVWGQGTTVTVSSASTKGPSVFPLAPSSKSTSGGTAALGCLVKDYFPEPVTVSWNSGALTSGVHTFPAVLQSSGLYSLSSVVTVPSSSLGTQTYICNVNHKPSNTKVDKKVEPKSCDKTHTCPPCPAPELLGGPSVFLFPPKPKDTLMISRTPEVTCVVVDVSHEDPEVKFNWYVDGVEVHNAKTKPCEEQYGSTYRCVSVLTVLHQDWLNGKEYKCKVSNKALPAPIEKTISKAKGQPREPQVYTLPPSREEMTKNQVSLTCLVKGFYPSDIAVEWESNGQPENNYKTTPPVLDSDGSFFLYSKLTVDKSRWQQGNVFSCSVMHEALHNHYTQKSLSLSPGK

SEQ ID NO: 551 - protein, 456 aa, synthetic construct; identical to SEQ ID NO: 550
  REGION 1..456: note = source = /note="Description of Artificial Sequence: Synthetic polypeptide"

SEQ ID NO: 552 - protein, 456 aa, synthetic construct
  REGION 1..456: note = source = /note="Description of Artificial Sequence: Synthetic polypeptide"
QVQLQESGPGLVKPSQTLSLTCTVSGDSISSGGYYWSWIRQPPGKGLEWIGYIYYSGSTYYNPSLKSRVTISVDTSKNQFSLKLSSVTAADTAVYYCARDRITIFGVVMGGGMDVWGQGTTVTVSSASTKGPSVFPLAPSSKSTSGGTAALGCLVKDYFPEPVTVSWNSGALTSGVHTFPAVLQSSGLYSLSSVVTVPSSSLGTQTYICNVNHKPSNTKVDKKVEPKSCDKTHTCPPCPAPELLGGPSVFLFPPKPKDTLMISRTPEVTCVVVDVSHEDPEVKFNWYVDGVEVHNAKTKPCEEQYGSTYRCVSVLTVLHQDWLNGKEYKCKVSNKALPAPIEKTISKAKGQPREPQVYTLPPSREEMTKNQVSLTCLVKGFYPSDIAVEWESNGQPENNYKTTPPVLDSDGSFFLYSKLTVDKSRWQQGNVFSCSVMHEALHNHYTQKSLSLSPGK

SEQ ID NO: 553 - protein, 456 aa, synthetic construct
  REGION 1..456: note = source = /note="Description of Artificial Sequence: Synthetic polypeptide"
QVQLQESGPGLVKPSETLSLTCTVSGDSISSGGYYWSWIRQHPGKGLEWIGYIYYSGSTYYNPSLKSRVTISVDTSKNQFSLKLSSVTAADTAVYYCARDRITIFGVVMGGGMDVWGQGTTVTVSSASTKGPSVFPLAPSSKSTSGGTAALGCLVKDYFPEPVTVSWNSGALTSGVHTFPAVLQSSGLYSLSSVVTVPSSSLGTQTYICNVNHKPSNTKVDKKVEPKSCDKTHTCPPCPAPELLGGPSVFLFPPKPKDTLMISRTPEVTCVVVDVSHEDPEVKFNWYVDGVEVHNAKTKPCEEQYGSTYRCVSVLTVLHQDWLNGKEYKCKVSNKALPAPIEKTISKAKGQPREPQVYTLPPSREEMTKNQVSLTCLVKGFYPSDIAVEWESNGQPENNYKTTPPVLDSDGSFFLYSKLTVDKSRWQQGNVFSCSVMHEALHNHYTQKSLSLSPGK

SEQ ID NO: 554 - protein, 456 aa, synthetic construct; identical to SEQ ID NO: 480
  REGION 1..456: note = source = /note="Description of Artificial Sequence: Synthetic polypeptide"

SEQ ID NO: 555 - protein, 456 aa, synthetic construct; identical to SEQ ID NO: 553
  REGION 1..456: note = source = /note="Description of Artificial Sequence: Synthetic polypeptide"

SEQ ID NO: 556 - protein, 456 aa, synthetic construct; identical to SEQ ID NO: 552
  REGION 1..456: note = source = /note="Description of Artificial Sequence: Synthetic polypeptide"

SEQ ID NO: 557 - protein, 453 aa, synthetic construct
  REGION 1..453: note = source = /note="Description of Artificial Sequence: Synthetic polypeptide"
QVQLVQSGAEVKKPGASVKVSCKASGYTFTGYYIHWVRQAPGQGLEWMGWINPESGGTDYSQRFQGRVTMTRDTSISTAYMELNRLRSDDTAVYYCAREATIFGMVIVPFDYWGQGTLVTVSSASTKGPSVFPLAPSSKSTSGGTAALGCLVKDYFPEPVTVSWNSGALTSGVHTFPAVLQSSGLYSLSSVVTVPSSSLGTQTYICNVNHKPSNTKVDKKVEPKSCDKTHTCPPCPAPELLGGPSVFLFPPKPKDTLMISRTPEVTCVVVDVSHEDPEVKFNWYVDGVEVHNAKTKPCEEQYGSTYRCVSVLTVLHQDWLNGKEYKCKVSNKALPAPIEKTISKAKGQPREPQVYTLPPSREEMTKNQVSLTCLVKGFYPSDIAVEWESNGQPENNYKTTPPVLDSDGSFFLYSKLTVDKSRWQQGNVFSCSVMHEALHNHYTQKSLSLSPGK

SEQ ID NO: 558 - protein, 453 aa, synthetic construct
  REGION 1..453: note = source = /note="Description of Artificial Sequence: Synthetic polypeptide"
QVPLVQSGAEVKKPGASVKVSCKASGYTFTGYYIHWVRQAPGQGLEWMGWINPESGGTDYSQRFQGRFTMTRDTSISTAYMELNRLRSDDTAVYYCAREATIFGMVIVPFDYWGQGTLVTVSSASTKGPSVFPLAPSSKSTSGGTAALGCLVKDYFPEPVTVSWNSGALTSGVHTFPAVLQSSGLYSLSSVVTVPSSSLGTQTYICNVNHKPSNTKVDKKVEPKSCDKTHTCPPCPAPELLGGPSVFLFPPKPKDTLMISRTPEVTCVVVDVSHEDPEVKFNWYVDGVEVHNAKTKPCEEQYGSTYRCVSVLTVLHQDWLNGKEYKCKVSNKALPAPIEKTISKAKGQPREPQVYTLPPSREEMTKNQVSLTCLVKGFYPSDIAVEWESNGQPENNYKTTPPVLDSDGSFFLYSKLTVDKSRWQQGNVFSCSVMHEALHNHYTQKSLSLSPGK

SEQ ID NO: 559 - protein, 453 aa, synthetic construct
  REGION 1..453: note = source = /note="Description of Artificial Sequence: Synthetic polypeptide"
QVQLVQSGAEVKKPGASVKVSCKASGYTFTGYYIHWVRQAPGQGLEWMGWINPDAGGTDYSQRFQGRVTMTRDTSISTAYMELNRLRSDDTAVYYCAREATIFGMVIVPFDYWGQGTLVTVSSASTKGPSVFPLAPSSKSTSGGTAALGCLVKDYFPEPVTVSWNSGALTSGVHTFPAVLQSSGLYSLSSVVTVPSSSLGTQTYICNVNHKPSNTKVDKKVEPKSCDKTHTCPPCPAPELLGGPSVFLFPPKPKDTLMISRTPEVTCVVVDVSHEDPEVKFNWYVDGVEVHNAKTKPCEEQYGSTYRCVSVLTVLHQDWLNGKEYKCKVSNKALPAPIEKTISKAKGQPREPQVYTLPPSREEMTKNQVSLTCLVKGFYPSDIAVEWESNGQPENNYKTTPPVLDSDGSFFLYSKLTVDKSRWQQGNVFSCSVMHEALHNHYTQKSLSLSPGK

SEQ ID NO: 560 - protein, 453 aa, synthetic construct
  REGION 1..453: note = source = /note="Description of Artificial Sequence: Synthetic polypeptide"
QVPLVQSGAEVKKPGASVKVSCKASGYTFTGYYIHWVRQAPGQGLEWMGWINPDAGGTDYSQRFQGRFTMTRDTSISTAYMELNRLRSDDTAVYYCAREATIFGMVIVPFDYWGQGTLVTVSSASTKGPSVFPLAPSSKSTSGGTAALGCLVKDYFPEPVTVSWNSGALTSGVHTFPAVLQSSGLYSLSSVVTVPSSSLGTQTYICNVNHKPSNTKVDKKVEPKSCDKTHTCPPCPAPELLGGPSVFLFPPKPKDTLMISRTPEVTCVVVDVSHEDPEVKFNWYVDGVEVHNAKTKPCEEQYGSTYRCVSVLTVLHQDWLNGKEYKCKVSNKALPAPIEKTISKAKGQPREPQVYTLPPSREEMTKNQVSLTCLVKGFYPSDIAVEWESNGQPENNYKTTPPVLDSDGSFFLYSKLTVDKSRWQQGNVFSCSVMHEALHNHYTQKSLSLSPGK

SEQ ID NO: 561 - protein, 453 aa, synthetic construct
  REGION 1..453: note = source = /note="Description of Artificial Sequence: Synthetic polypeptide"
QVQLVQSGAEVKKPGASVKVSCKASGYTFTGYYIHWVRQAPGQGLEWMGWINPDSGGTDYSQRFQGRVTMTRDTSISTAYMELNRLRSDDTAVYYCAREATIFGMVIVPFDYWGQGTLVTVSSASTKGPSVFPLAPSSKSTSGGTAALGCLVKDYFPEPVTVSWNSGALTSGVHTFPAVLQSSGLYSLSSVVTVPSSSLGTQTYICNVNHKPSNTKVDKKVEPKSCDKTHTCPPCPAPELLGGPSVFLFPPKPKDTLMISRTPEVTCVVVDVSHEDPEVKFNWYVDGVEVHNAKTKPCEEQYGSTYRCVSVLTVLHQDWLNGKEYKCKVSNKALPAPIEKTISKAKGQPREPQVYTLPPSREEMTKNQVSLTCLVKGFYPSDIAVEWESNGQPENNYKTTPPVLDSDGSFFLYSKLTVDKSRWQQGNVFSCSVMHEALHNHYTQKSLSLSPGK

SEQ ID NO: 562 - protein, 453 aa, synthetic construct
  REGION 1..453: note = source = /note="Description of Artificial Sequence: Synthetic polypeptide"
QVQLVQSGAEVKKPGASVKVSCKASGYTFTGYYIHWVRQAPGQGLEWMGWINPDSGGTDYSQRFQGRFTMTRDTSISTAYMELNRLRSDDTAVYYCAREATIFGMVIVPFDYWGQGTLVTVSSASTKGPSVFPLAPSSKSTSGGTAALGCLVKDYFPEPVTVSWNSGALTSGVHTFPAVLQSSGLYSLSSVVTVPSSSLGTQTYICNVNHKPSNTKVDKKVEPKSCDKTHTCPPCPAPELLGGPSVFLFPPKPKDTLMISRTPEVTCVVVDVSHEDPEVKFNWYVDGVEVHNAKTKPCEEQYGSTYRCVSVLTVLHQDWLNGKEYKCKVSNKALPAPIEKTISKAKGQPREPQVYTLPPSREEMTKNQVSLTCLVKGFYPSDIAVEWESNGQPENNYKTTPPVLDSDGSFFLYSKLTVDKSRWQQGNVFSCSVMHEALHNHYTQKSLSLSPGK

SEQ ID NO: 563 - protein, 453 aa, synthetic construct
  REGION 1..453: note = source = /note="Description of Artificial Sequence: Synthetic polypeptide"
QVPLVQSGAEVKKPGASVKVSCKASGYTFTGYYIHWVRQAPGQGLEWMGWINPDSGGTDYSQRFQGRVTMTRDTSISTAYMELNRLRSDDTAVYYCAREATIFGMVIVPFDYWGQGTLVTVSSASTKGPSVFPLAPSSKSTSGGTAALGCLVKDYFPEPVTVSWNSGALTSGVHTFPAVLQSSGLYSLSSVVTVPSSSLGTQTYICNVNHKPSNTKVDKKVEPKSCDKTHTCPPCPAPELLGGPSVFLFPPKPKDTLMISRTPEVTCVVVDVSHEDPEVKFNWYVDGVEVHNAKTKPCEEQYGSTYRCVSVLTVLHQDWLNGKEYKCKVSNKALPAPIEKTISKAKGQPREPQVYTLPPSREEMTKNQVSLTCLVKGFYPSDIAVEWESNGQPENNYKTTPPVLDSDGSFFLYSKLTVDKSRWQQGNVFSCSVMHEALHNHYTQKSLSLSPGK

SEQ ID NO: 564 - protein, 453 aa, synthetic construct
  REGION 1..453: note = source = /note="Description of Artificial Sequence: Synthetic polypeptide"
QVQLVQSGAEVKKPGASVKVSCKASGYTFTGYYIHWVRQAPGQGLEWMGWINPDAGGTDYSQRFQGRFTMTRDTSISTAYMELNRLRSDDTAVYYCAREATIFGMVIVPFDYWGQGTLVTVSSASTKGPSVFPLAPSSKSTSGGTAALGCLVKDYFPEPVTVSWNSGALTSGVHTFPAVLQSSGLYSLSSVVTVPSSSLGTQTYICNVNHKPSNTKVDKKVEPKSCDKTHTCPPCPAPELLGGPSVFLFPPKPKDTLMISRTPEVTCVVVDVSHEDPEVKFNWYVDGVEVHNAKTKPCEEQYGSTYRCVSVLTVLHQDWLNGKEYKCKVSNKALPAPIEKTISKAKGQPREPQVYTLPPSREEMTKNQVSLTCLVKGFYPSDIAVEWESNGQPENNYKTTPPVLDSDGSFFLYSKLTVDKSRWQQGNVFSCSVMHEALHNHYTQKSLSLSPGK

SEQ ID NO: 565 - protein, 453 aa, synthetic construct
  REGION 1..453: note = source = /note="Description of Artificial Sequence: Synthetic polypeptide"
QVPLVQSGAEVKKPGASVKVSCKASGYTFTGYYIHWVRQAPGQGLEWMGWINPDAGGTDYSQRFQGRVTMTRDTSISTAYMELNRLRSDDTAVYYCAREATIFGMVIVPFDYWGQGTLVTVSSASTKGPSVFPLAPSSKSTSGGTAALGCLVKDYFPEPVTVSWNSGALTSGVHTFPAVLQSSGLYSLSSVVTVPSSSLGTQTYICNVNHKPSNTKVDKKVEPKSCDKTHTCPPCPAPELLGGPSVFLFPPKPKDTLMISRTPEVTCVVVDVSHEDPEVKFNWYVDGVEVHNAKTKPCEEQYGSTYRCVSVLTVLHQDWLNGKEYKCKVSNKALPAPIEKTISKAKGQPREPQVYTLPPSREEMTKNQVSLTCLVKGFYPSDIAVEWESNGQPENNYKTTPPVLDSDGSFFLYSKLTVDKSRWQQGNVFSCSVMHEALHNHYTQKSLSLSPGK

SEQ ID NO: 566 - protein, 453 aa, synthetic construct
  REGION 1..453: note = source = /note="Description of Artificial Sequence: Synthetic polypeptide"
QVQLVQSGAEVKKPGASVKVSCKASGYTFTGYYIHWVRQAPGQGLEWMGWINPDAGGTDYSQRFQGRVTMTRDTSISTAYMELNSLRSDDTAVYYCAREATIFGMVIVPFDYWGQGTLVTVSSASTKGPSVFPLAPSSKSTSGGTAALGCLVKDYFPEPVTVSWNSGALTSGVHTFPAVLQSSGLYSLSSVVTVPSSSLGTQTYICNVNHKPSNTKVDKKVEPKSCDKTHTCPPCPAPELLGGPSVFLFPPKPKDTLMISRTPEVTCVVVDVSHEDPEVKFNWYVDGVEVHNAKTKPCEEQYGSTYRCVSVLTVLHQDWLNGKEYKCKVSNKALPAPIEKTISKAKGQPREPQVYTLPPSREEMTKNQVSLTCLVKGFYPSDIAVEWESNGQPENNYKTTPPVLDSDGSFFLYSKLTVDKSRWQQGNVFSCSVMHEALHNHYTQKSLSLSPGK

SEQ ID NO: 567 - protein, 453 aa, synthetic construct
  REGION 1..453: note = source = /note="Description of Artificial Sequence: Synthetic polypeptide"
QVQLVQSGAEVKKPGASVKVSCKASGYTFTGYYIHWVRQAPGQGLEWMGWINPESGGTDYSQRFQGRVTMTRDTSISTAYMELNSLRSDDTAVYYCAREATIFGMVIVPFDYWGQGTLVTVSSASTKGPSVFPLAPSSKSTSGGTAALGCLVKDYFPEPVTVSWNSGALTSGVHTFPAVLQSSGLYSLSSVVTVPSSSLGTQTYICNVNHKPSNTKVDKKVEPKSCDKTHTCPPCPAPELLGGPSVFLFPPKPKDTLMISRTPEVTCVVVDVSHEDPEVKFNWYVDGVEVHNAKTKPCEEQYGSTYRCVSVLTVLHQDWLNGKEYKCKVSNKALPAPIEKTISKAKGQPREPQVYTLPPSREEMTKNQVSLTCLVKGFYPSDIAVEWESNGQPENNYKTTPPVLDSDGSFFLYSKLTVDKSRWQQGNVFSCSVMHEALHNHYTQKSLSLSPGK

SEQ ID NO: 568 - protein, 453 aa, synthetic construct
  REGION 1..453: note = source = /note="Description of Artificial Sequence: Synthetic polypeptide"
QVPLVQSGAEVKKPGASVKVSCKASGYTFTGYYIHWVRQAPGQGLVWMGWISPNSGETSYAQKFQDRVTMTRDTSISTAYMELSRLRSDDTAVYFCAREATIFGMLIVPFDYWGQGTLVTVSSASTKGPSVFPLAPSSKSTSGGTAALGCLVKDYFPEPVTVSWNSGALTSGVHTFPAVLQSSGLYSLSSVVTVPSSSLGTQTYICNVNHKPSNTKVDKKVEPKSCDKTHTCPPCPAPELLGGPSVFLFPPKPKDTLMISRTPEVTCVVVDVSHEDPEVKFNWYVDGVEVHNAKTKPCEEQYGSTYRCVSVLTVLHQDWLNGKEYKCKVSNKALPAPIEKTISKAKGQPREPQVYTLPPSREEMTKNQVSLTCLVKGFYPSDIAVEWESNGQPENNYKTTPPVLDSDGSFFLYSKLTVDKSRWQQGNVFSCSVMHEALHNHYTQKSLSLSPGK

SEQ ID NO: 569 - protein, 453 aa, synthetic construct
  REGION 1..453: note = source = /note="Description of Artificial Sequence: Synthetic polypeptide"
QVPLVQSGAEVKKPGASVKVSCKASGYTFTGYYIHWVRQAPGQGLVWMGWISPNSGDTSYAQKFQDRVTMTRDTSISTAYMELSRLRSDDTAVYFCAREATIFGMLIVPFDYWGQGTLVTVSSASTKGPSVFPLAPSSKSTSGGTAALGCLVKDYFPEPVTVSWNSGALTSGVHTFPAVLQSSGLYSLSSVVTVPSSSLGTQTYICNVNHKPSNTKVDKKVEPKSCDKTHTCPPCPAPELLGGPSVFLFPPKPKDTLMISRTPEVTCVVVDVSHEDPEVKFNWYVDGVEVHNAKTKPCEEQYGSTYRCVSVLTVLHQDWLNGKEYKCKVSNKALPAPIEKTISKAKGQPREPQVYTLPPSREEMTKNQVSLTCLVKGFYPSDIAVEWESNGQPENNYKTTPPVLDSDGSFFLYSKLTVDKSRWQQGNVFSCSVMHEALHNHYTQKSLSLSPGK

SEQ ID NO: 570 - protein, 453 aa, synthetic construct; identical to SEQ ID NO: 568
  REGION 1..453: note = source = /note="Description of Artificial Sequence: Synthetic polypeptide"

SEQ ID NO: 571 - protein, 453 aa, synthetic construct
  REGION 1..453: note = source = /note="Description of Artificial Sequence: Synthetic polypeptide"
QVPLVQSGAEVKKPGASVKVSCKASGYTFTGYYIHWVRQAPGQGLVWMGWISPNSGETSYAQKFQDRVTMTRDTSISTAYMELSRLRSDDTAVYFCTREATIFGMLIVPFDYWGQGTLVTVSSASTKGPSVFPLAPSSKSTSGGTAALGCLVKDYFPEPVTVSWNSGALTSGVHTFPAVLQSSGLYSLSSVVTVPSSSLGTQTYICNVNHKPSNTKVDKKVEPKSCDKTHTCPPCPAPELLGGPSVFLFPPKPKDTLMISRTPEVTCVVVDVSHEDPEVKFNWYVDGVEVHNAKTKPCEEQYGSTYRCVSVLTVLHQDWLNGKEYKCKVSNKALPAPIEKTISKAKGQPREPQVYTLPPSREEMTKNQVSLTCLVKGFYPSDIAVEWESNGQPENNYKTTPPVLDSDGSFFLYSKLTVDKSRWQQGNVFSCSVMHEALHNHYTQKSLSLSPGK

SEQ ID NO: 572 - protein, 453 aa, synthetic construct; identical to SEQ ID NO: 478
  REGION 1..453: note = source = /note="Description of Artificial Sequence: Synthetic polypeptide"

SEQ ID NO: 573 - protein, 453 aa, synthetic construct; identical to SEQ ID NO: 571
  REGION 1..453: note = source = /note="Description of Artificial Sequence: Synthetic polypeptide"

SEQ ID NO: 574 - protein, 453 aa, synthetic construct; identical to SEQ ID NO: 569
  REGION 1..453: note = source = /note="Description of Artificial Sequence: Synthetic polypeptide"

SEQ ID NO: 575 - protein, 453 aa, synthetic construct
  REGION 1..453: note = source = /note="Description of Artificial Sequence: Synthetic polypeptide"
QVQLVQSGAEVKKPGASVKVSCKASGYTFTGYYIHWVRQAPGQGLEWMGWISPNSGETSYAQKFQDRVTMTRDTSISTAYMELSSLRSDDTAVYFCAREATIFGMLIVPFDYWGQGTLVTVSSASTKGPSVFPLAPSSKSTSGGTAALGCLVKDYFPEPVTVSWNSGALTSGVHTFPAVLQSSGLYSLSSVVTVPSSSLGTQTYICNVNHKPSNTKVDKKVEPKSCDKTHTCPPCPAPELLGGPSVFLFPPKPKDTLMISRTPEVTCVVVDVSHEDPEVKFNWYVDGVEVHNAKTKPCEEQYGSTYRCVSVLTVLHQDWLNGKEYKCKVSNKALPAPIEKTISKAKGQPREPQVYTLPPSREEMTKNQVSLTCLVKGFYPSDIAVEWESNGQPENNYKTTPPVLDSDGSFFLYSKLTVDKSRWQQGNVFSCSVMHEALHNHYTQKSLSLSPGK

SEQ ID NO: 576 - protein, 453 aa, synthetic construct
  REGION 1..453: note = source = /note="Description of Artificial Sequence: Synthetic polypeptide"
QVQLVQSGAEVKKPGASVKVSCKASGYTFTGYYIHWVRQAPGQGLEWMGWISPNSGETSYAQKFQDRVTMTRDTSISTAYMELSRLRSDDTAVYFCAREATIFGMLIVPFDYWGQGTLVTVSSASTKGPSVFPLAPSSKSTSGGTAALGCLVKDYFPEPVTVSWNSGALTSGVHTFPAVLQSSGLYSLSSVVTVPSSSLGTQTYICNVNHKPSNTKVDKKVEPKSCDKTHTCPPCPAPELLGGPSVFLFPPKPKDTLMISRTPEVTCVVVDVSHEDPEVKFNWYVDGVEVHNAKTKPCEEQYGSTYRCVSVLTVLHQDWLNGKEYKCKVSNKALPAPIEKTISKAKGQPREPQVYTLPPSREEMTKNQVSLTCLVKGFYPSDIAVEWESNGQPENNYKTTPPVLDSDGSFFLYSKLTVDKSRWQQGNVFSCSVMHEALHNHYTQKSLSLSPGK

SEQ ID NO: 577 - protein, 453 aa, synthetic construct
  REGION 1..453: note = source = /note="Description of Artificial Sequence: Synthetic polypeptide"
QVPLVQSGAEVKKPGASVKVSCKASGYTFTGYYIHWVRQAPGQGLEWMGWINPESGGTDYSQRFQGRVTMTRDTSISTAYMELSRLRSDDTAVYYCAREATIFGMVIVPFDYWGQGTLVTVSSASTKGPSVFPLAPSSKSTSGGTAALGCLVKDYFPEPVTVSWNSGALTSGVHTFPAVLQSSGLYSLSSVVTVPSSSLGTQTYICNVNHKPSNTKVDKKVEPKSCDKTHTCPPCPAPELLGGPSVFLFPPKPKDTLMISRTPEVTCVVVDVSHEDPEVKFNWYVDGVEVHNAKTKPCEEQYGSTYRCVSVLTVLHQDWLNGKEYKCKVSNKALPAPIEKTISKAKGQPREPQVYTLPPSREEMTKNQVSLTCLVKGFYPSDIAVEWESNGQPENNYKTTPPVLDSDGSFFLYSKLTVDKSRWQQGNVFSCSVMHEALHNHYTQKSLSLSPGK

SEQ ID NO: 578 - protein, 453 aa, synthetic construct
  REGION 1..453: note = source = /note="Description of Artificial Sequence: Synthetic polypeptide"
QVPLVQSGAEVKKPGASVKVSCKASGYTFTGYYIHWVRQAPGQGLEWMGWINPESGGTDYSQRFQGRFTMTRDTSISTAYMELSRLRSDDTAVYYCAREATIFGMVIVPFDYWGQGTLVTVSSASTKGPSVFPLAPSSKSTSGGTAALGCLVKDYFPEPVTVSWNSGALTSGVHTFPAVLQSSGLYSLSSVVTVPSSSLGTQTYICNVNHKPSNTKVDKKVEPKSCDKTHTCPPCPAPELLGGPSVFLFPPKPKDTLMISRTPEVTCVVVDVSHEDPEVKFNWYVDGVEVHNAKTKPCEEQYGSTYRCVSVLTVLHQDWLNGKEYKCKVSNKALPAPIEKTISKAKGQPREPQVYTLPPSREEMTKNQVSLTCLVKGFYPSDIAVEWESNGQPENNYKTTPPVLDSDGSFFLYSKLTVDKSRWQQGNVFSCSVMHEALHNHYTQKSLSLSPGK

SEQ ID NO: 579 - protein, 453 aa, synthetic construct
  REGION 1..453: note = source = /note="Description of Artificial Sequence: Synthetic polypeptide"
QVPLVQSGAEVKKPGASVKVSCKASGYTFTGYYIHWVRQAPGQGLEWMGWINPDSGGTDYSQRFQGRVTMTRDTSISTAYMELSRLRSDDTAVYYCAREATIFGMVIVPFDYWGQGTLVTVSSASTKGPSVFPLAPSSKSTSGGTAALGCLVKDYFPEPVTVSWNSGALTSGVHTFPAVLQSSGLYSLSSVVTVPSSSLGTQTYICNVNHKPSNTKVDKKVEPKSCDKTHTCPPCPAPELLGGPSVFLFPPKPKDTLMISRTPEVTCVVVDVSHEDPEVKFNWYVDGVEVHNAKTKPCEEQYGSTYRCVSVLTVLHQDWLNGKEYKCKVSNKALPAPIEKTISKAKGQPREPQVYTLPPSREEMTKNQVSLTCLVKGFYPSDIAVEWESNGQPENNYKTTPPVLDSDGSFFLYSKLTVDKSRWQQGNVFSCSVMHEALHNHYTQKSLSLSPGK

SEQ ID NO: 580 - protein, 453 aa, synthetic construct
  REGION 1..453: note = source = /note="Description of Artificial Sequence: Synthetic polypeptide"
QVQLVQSGAEVKKPGASVKVSCKASGYTFTGYYIHWVRQAPGQGLEWMGWINPESGGTDYSQRFQGRVTMTRDTSISTAYMELSSLRSDDTAVYYCAREATIFGMVIVPFDYWGQGTLVTVSSASTKGPSVFPLAPSSKSTSGGTAALGCLVKDYFPEPVTVSWNSGALTSGVHTFPAVLQSSGLYSLSSVVTVPSSSLGTQTYICNVNHKPSNTKVDKKVEPKSCDKTHTCPPCPAPELLGGPSVFLFPPKPKDTLMISRTPEVTCVVVDVSHEDPEVKFNWYVDGVEVHNAKTKPCEEQYGSTYRCVSVLTVLHQDWLNGKEYKCKVSNKALPAPIEKTISKAKGQPREPQVYTLPPSREEMTKNQVSLTCLVKGFYPSDIAVEWESNGQPENNYKTTPPVLDSDGSFFLYSKLTVDKSRWQQGNVFSCSVMHEALHNHYTQKSLSLSPGK

SEQ ID NO: 581 - protein, 453 aa, synthetic construct; identical to SEQ ID NO: 577
  REGION 1..453: note = source = /note="Description of Artificial Sequence: Synthetic polypeptide"

SEQ ID NO: 582 - protein, 453 aa, synthetic construct
  REGION 1..453: note = source = /note="Description of Artificial Sequence: Synthetic polypeptide"
QVPLVQSGAEVKKPGASVKVSCKASGYTFTGYYIHWVRQAPGQGLEWMGWISPNQGETNYAQKFQDRVTMTRDTSISTAYMELSRLRSDDTAVYYCAREATIFGMLIVPFDYWGQGTLVTVSSASTKGPSVFPLAPSSKSTSGGTAALGCLVKDYFPEPVTVSWNSGALTSGVHTFPAVLQSSGLYSLSSVVTVPSSSLGTQTYICNVNHKPSNTKVDKKVEPKSCDKTHTCPPCPAPELLGGPSVFLFPPKPKDTLMISRTPEVTCVVVDVSHEDPEVKFNWYVDGVEVHNAKTKPCEEQYGSTYRCVSVLTVLHQDWLNGKEYKCKVSNKALPAPIEKTISKAKGQPREPQVYTLPPSREEMTKNQVSLTCLVKGFYPSDIAVEWESNGQPENNYKTTPPVLDSDGSFFLYSKLTVDKSRWQQGNVFSCSVMHEALHNHYTQKSLSLSPGK

SEQ ID NO: 583 - protein, 453 aa, synthetic construct
  REGION 1..453: note = source = /note="Description of Artificial Sequence: Synthetic polypeptide"
QVPLVQSGAEVKKPGASVKVSCKASGYTFTGYYIHWVRQAPGQGLEWMGWISPNQGDTNYAQKFQDRVTMTRDTSISTAYMELSRLRSDDTAVYYCAREATIFGMLIVPFDYWGQGTLVTVSSASTKGPSVFPLAPSSKSTSGGTAALGCLVKDYFPEPVTVSWNSGALTSGVHTFPAVLQSSGLYSLSSVVTVPSSSLGTQTYICNVNHKPSNTKVDKKVEPKSCDKTHTCPPCPAPELLGGPSVFLFPPKPKDTLMISRTPEVTCVVVDVSHEDPEVKFNWYVDGVEVHNAKTKPCEEQYGSTYRCVSVLTVLHQDWLNGKEYKCKVSNKALPAPIEKTISKAKGQPREPQVYTLPPSREEMTKNQVSLTCLVKGFYPSDIAVEWESNGQPENNYKTTPPVLDSDGSFFLYSKLTVDKSRWQQGNVFSCSVMHEALHNHYTQKSLSLSPGK

SEQ ID NO: 584 - protein, 453 aa, synthetic construct
  REGION 1..453: note = source = /note="Description of Artificial Sequence: Synthetic polypeptide"
QVPLVQSGAEVKKPGASVKVSCKASGYTFTGYYIHWVRQAPGQGLEWMGWISPNQGETNYAQKFQDRVTMTRDTSISTAYMELSRLRSDDTAVYYCTREATIFGMLIVPFDYWGQGTLVTVSSASTKGPSVFPLAPSSKSTSGGTAALGCLVKDYFPEPVTVSWNSGALTSGVHTFPAVLQSSGLYSLSSVVTVPSSSLGTQTYICNVNHKPSNTKVDKKVEPKSCDKTHTCPPCPAPELLGGPSVFLFPPKPKDTLMISRTPEVTCVVVDVSHEDPEVKFNWYVDGVEVHNAKTKPCEEQYGSTYRCVSVLTVLHQDWLNGKEYKCKVSNKALPAPIEKTISKAKGQPREPQVYTLPPSREEMTKNQVSLTCLVKGFYPSDIAVEWESNGQPENNYKTTPPVLDSDGSFFLYSKLTVDKSRWQQGNVFSCSVMHEALHNHYTQKSLSLSPGK

SEQ ID NO: 585 - protein, 453 aa, synthetic construct
  REGION 1..453: note = source = /note="Description of Artificial Sequence: Synthetic polypeptide"
QVPLVQSGAEVKKPGASVKVSCKASGYTFTGYYIHWVRQAPGQGLEWMGWISPNNGETNYAQKFQDRVTMTRDTSISTAYMELSRLRSDDTAVYYCAREATIFGMLIVPFDYWGQGTLVTVSSASTKGPSVFPLAPSSKSTSGGTAALGCLVKDYFPEPVTVSWNSGALTSGVHTFPAVLQSSGLYSLSSVVTVPSSSLGTQTYICNVNHKPSNTKVDKKVEPKSCDKTHTCPPCPAPELLGGPSVFLFPPKPKDTLMISRTPEVTCVVVDVSHEDPEVKFNWYVDGVEVHNAKTKPCEEQYGSTYRCVSVLTVLHQDWLNGKEYKCKVSNKALPAPIEKTISKAKGQPREPQVYTLPPSREEMTKNQVSLTCLVKGFYPSDIAVEWESNGQPENNYKTTPPVLDSDGSFFLYSKLTVDKSRWQQGNVFSCSVMHEALHNHYTQKSLSLSPGK

SEQ ID NO: 586 - protein, 453 aa, synthetic construct
  REGION 1..453: note = source = /note="Description of Artificial Sequence: Synthetic polypeptide"
QVPLVQSGAEVKKPGASVKVSCKASGYTFTGYYIHWVRQAPGQGLEWMGWISPNNGDTNYAQKFQDRVTMTRDTSISTAYMELSRLRSDDTAVYYCAREATIFGMLIVPFDYWGQGTLVTVSSASTKGPSVFPLAPSSKSTSGGTAALGCLVKDYFPEPVTVSWNSGALTSGVHTFPAVLQSSGLYSLSSVVTVPSSSLGTQTYICNVNHKPSNTKVDKKVEPKSCDKTHTCPPCPAPELLGGPSVFLFPPKPKDTLMISRTPEVTCVVVDVSHEDPEVKFNWYVDGVEVHNAKTKPCEEQYGSTYRCVSVLTVLHQDWLNGKEYKCKVSNKALPAPIEKTISKAKGQPREPQVYTLPPSREEMTKNQVSLTCLVKGFYPSDIAVEWESNGQPENNYKTTPPVLDSDGSFFLYSKLTVDKSRWQQGNVFSCSVMHEALHNHYTQKSLSLSPGK

SEQ ID NO: 587 - protein, 453 aa, synthetic construct
  REGION 1..453: note = source = /note="Description of Artificial Sequence: Synthetic polypeptide"
QVPLVQSGAEVKKPGASVKVSCKASGYTFTGYYIHWVRQAPGQGLEWMGWISPNQGDTNYAQKFQDRVTMTRDTSISTAYMELSRLRSDDTAVYYCTREATIFGMLIVPFDYWGQGTLVTVSSASTKGPSVFPLAPSSKSTSGGTAALGCLVKDYFPEPVTVSWNSGALTSGVHTFPAVLQSSGLYSLSSVVTVPSSSLGTQTYICNVNHKPSNTKVDKKVEPKSCDKTHTCPPCPAPELLGGPSVFLFPPKPKDTLMISRTPEVTCVVVDVSHEDPEVKFNWYVDGVEVHNAKTKPCEEQYGSTYRCVSVLTVLHQDWLNGKEYKCKVSNKALPAPIEKTISKAKGQPREPQVYTLPPSREEMTKNQVSLTCLVKGFYPSDIAVEWESNGQPENNYKTTPPVLDSDGSFFLYSKLTVDKSRWQQGNVFSCSVMHEALHNHYTQKSLSLSPGK

SEQ ID NO: 588 - protein, 453 aa, synthetic construct
  REGION 1..453: note = source = /note="Description of Artificial Sequence: Synthetic polypeptide"
QVPLVQSGAEVKKPGASVKVSCKASGYTFTGYYIHWVRQAPGQGLEWMGWISPNNGETNYAQKFQDRVTMTRDTSISTAYMELSRLRSDDTAVYYCTREATIFGMLIVPFDYWGQGTLVTVSSASTKGPSVFPLAPSSKSTSGGTAALGCLVKDYFPEPVTVSWNSGALTSGVHTFPAVLQSSGLYSLSSVVTVPSSSLGTQTYICNVNHKPSNTKVDKKVEPKSCDKTHTCPPCPAPELLGGPSVFLFPPKPKDTLMISRTPEVTCVVVDVSHEDPEVKFNWYVDGVEVHNAKTKPCEEQYGSTYRCVSVLTVLHQDWLNGKEYKCKVSNKALPAPIEKTISKAKGQPREPQVYTLPPSREEMTKNQVSLTCLVKGFYPSDIAVEWESNGQPENNYKTTPPVLDSDGSFFLYSKLTVDKSRWQQGNVFSCSVMHEALHNHYTQKSLSLSPGK

SEQ ID NO: 589 - protein, 453 aa, synthetic construct; identical to SEQ ID NO: 582
  REGION 1..453: note = source = /note="Description of Artificial Sequence: Synthetic polypeptide"

SEQ ID NO: 590 - protein, 453 aa, synthetic construct; identical to SEQ ID NO: 586
  REGION 1..453: note = source = /note="Description of Artificial Sequence: Synthetic polypeptide"

SEQ ID NO: 591 - protein, 453 aa, synthetic construct; identical to SEQ ID NO: 583
  REGION 1..453: note = source = /note="Description of Artificial Sequence: Synthetic polypeptide"

SEQ ID NO: 592 - protein, 453 aa, synthetic construct; identical to SEQ ID NO: 585
  REGION 1..453: note = source = /note="Description of Artificial Sequence: Synthetic polypeptide"

SEQ ID NO: 593 - protein, 453 aa, synthetic construct
  REGION 1..453: note = source = /note="Description of Artificial Sequence: Synthetic polypeptide"
QVQLVQSGAEVKKPGASVKVSCKASGYTFTGYYIHWVRQAPGQGLEWMGWISPNQGETNYAQKFQDRVTMTRDTSISTAYMELSSLRSDDTAVYYCAREATIFGMLIVPFDYWGQGTLVTVSSASTKGPSVFPLAPSSKSTSGGTAALGCLVKDYFPEPVTVSWNSGALTSGVHTFPAVLQSSGLYSLSSVVTVPSSSLGTQTYICNVNHKPSNTKVDKKVEPKSCDKTHTCPPCPAPELLGGPSVFLFPPKPKDTLMISRTPEVTCVVVDVSHEDPEVKFNWYVDGVEVHNAKTKPCEEQYGSTYRCVSVLTVLHQDWLNGKEYKCKVSNKALPAPIEKTISKAKGQPREPQVYTLPPSREEMTKNQVSLTCLVKGFYPSDIAVEWESNGQPENNYKTTPPVLDSDGSFFLYSKLTVDKSRWQQGNVFSCSVMHEALHNHYTQKSLSLSPGK

SEQ ID NO: 594 - protein, 453 aa, synthetic construct; identical to SEQ ID NO: 593
  REGION 1..453: note = source = /note="Description of Artificial Sequence: Synthetic polypeptide"

SEQ ID NO: 595 - protein, 458 aa, synthetic construct; identical to SEQ ID NO: 472
  REGION 1..458: note = source = /note="Description of Artificial Sequence: Synthetic polypeptide"

SEQ ID NO: 596 - protein, 458 aa, synthetic construct; identical to SEQ ID NO: 472
  REGION 1..458: note = source = /note="Description of Artificial Sequence: Synthetic polypeptide"

SEQ ID NO: 597 - protein, 458 aa, synthetic construct; identical to SEQ ID NO: 472
  REGION 1..458: note = source = /note="Description of Artificial Sequence: Synthetic polypeptide"

SEQ ID NO: 598 - protein, 458 aa, synthetic construct; identical to SEQ ID NO: 472
  REGION 1..458: note = source = /note="Description of Artificial Sequence: Synthetic polypeptide"

SEQ ID NO: 599 - protein, 458 aa, synthetic construct; identical to SEQ ID NO: 472
  REGION 1..458: note = source = /note="Description of Artificial Sequence: Synthetic polypeptide"

SEQ ID NO: 600 - protein, 458 aa, synthetic construct; identical to SEQ ID NO: 472
  REGION 1..458: note = source = /note="Description of Artificial Sequence: Synthetic polypeptide"

SEQ ID NO: 601 - protein, 458 aa, synthetic construct; identical to SEQ ID NO: 472
  REGION 1..458: note = source = /note="Description of Artificial Sequence: Synthetic polypeptide"

SEQ ID NO: 602 - protein, 458 aa, synthetic construct; identical to SEQ ID NO: 472
  REGION 1..458: note = source = /note="Description of Artificial Sequence: Synthetic polypeptide"

SEQ ID NO: 603 - protein, 458 aa, synthetic construct; identical to SEQ ID NO: 472
  REGION 1..458: note = source = /note="Description of Artificial Sequence: Synthetic polypeptide"

SEQ ID NO: 604 - protein, 458 aa, synthetic construct; identical to SEQ ID NO: 472
  REGION 1..458: note = source = /note="Description of Artificial Sequence: Synthetic polypeptide"

SEQ ID NO: 605 - protein, 458 aa, synthetic construct; identical to SEQ ID NO: 472
  REGION 1..458: note = source = /note="Description of Artificial Sequence: Synthetic polypeptide"

SEQ ID NO: 606 - protein, 458 aa, synthetic construct; identical to SEQ ID NO: 472
  REGION 1..458: note = source = /note="Description of Artificial Sequence: Synthetic polypeptide"

SEQ ID NO: 607 - protein, 458 aa, synthetic construct
  REGION 1..458: note = source = /note="Description of Artificial Sequence: Synthetic polypeptide"
QMQVVQSGAEVKKPGASVKVSCKASGYTFTGYYMHWVRQAPGQGLEWMGWINPNSGGTNYAQKFQGRVTMTRDTSISTAYMELSSLRSDDTAVYYCARGGDYVFGTYRPHYYYGMDVWGQGTTVTVSSASTKGPSVFPLAPSSKSTSGGTAALGCLVKDYFPEPVTVSWNSGALTSGVHTFPAVLQSSGLYSLSSVVTVPSSSLGTQTYICNVNHKPSNTKVDKKVEPKSCDKTHTCPPCPAPELLGGPSVFLFPPKPKDTLMISRTPEVTCVVVDVSHEDPEVKFNWYVDGVEVHNAKTKPCEEQYGSTYRCVSVLTVLHQDWLNGKEYKCKVSNKALPAPIEKTISKAKGQPREPQVYTLPPSREEMTKNQVSLTCLVKGFYPSDIAVEWESNGQPENNYKTTPPVLDSDGSFFLYSKLTVDKSRWQQGNVFSCSVMHEALHNHYTQKSLSLSPGK

SEQ ID NO: 608 - protein, 458 aa, synthetic construct
  REGION 1..458: note = source = /note="Description of Artificial Sequence: Synthetic polypeptide"
QMQVVQSGAEVKKPGASVKVSCKASGYTFTGYYMHWVRQAPGQGLEWMGWINPNSGGTNYAQKFQGRVTMTRDTSISTAYMELSRLRSDDTAVYYCARGGDYVFGTYRPHYYYGMDVWGQGTTVTVSSASTKGPSVFPLAPSSKSTSGGTAALGCLVKDYFPEPVTVSWNSGALTSGVHTFPAVLQSSGLYSLSSVVTVPSSSLGTQTYICNVNHKPSNTKVDKKVEPKSCDKTHTCPPCPAPELLGGPSVFLFPPKPKDTLMISRTPEVTCVVVDVSHEDPEVKFNWYVDGVEVHNAKTKPCEEQYGSTYRCVSVLTVLHQDWLNGKEYKCKVSNKALPAPIEKTISKAKGQPREPQVYTLPPSREEMTKNQVSLTCLVKGFYPSDIAVEWESNGQPENNYKTTPPVLDSDGSFFLYSKLTVDKSRWQQGNVFSCSVMHEALHNHYTQKSLSLSPGK

SEQ ID NO: 609 - protein, 451 aa, synthetic construct; identical to SEQ ID NO: 509
  REGION 1..451: note = source = /note="Description of Artificial Sequence: Synthetic polypeptide"

SEQ ID NO: 610 - protein, 451 aa, synthetic construct; identical to SEQ ID NO: 491
  REGION 1..451: note = source = /note="Description of Artificial Sequence: Synthetic polypeptide"

SEQ ID NO: 611 - protein, 458 aa, synthetic construct; identical to SEQ ID NO: 472
  REGION 1..458: note = source = /note="Description of Artificial Sequence: Synthetic polypeptide"

SEQ ID NO: 612 - protein, 451 aa, synthetic construct
  REGION 1..451: note = source = /note="Description of Artificial Sequence: Synthetic polypeptide"
QVQLVESGGGVVQPGRSLRLSCTASGFTFSSYGIHWVRQAPGKGLEWVAVIWYDGSNKFHADSVKGRFTISRDNSKNTLYLQMNSLRAEDSAMYFCARGKVAGMPEAFEIWGQGTKVTVSSASTKGPSVFPLAPSSKSTSGGTAALGCLVKDYFPEPVTVSWNSGALTSGVHTFPAVLQSSGLYSLSSVVTVPSSSLGTQTYICNVNHKPSNTKVDKKVEPKSCDKTHTCPPCPAPELLGGPSVFLFPPKPKDTLMISRTPEVTCVVVDVSHEDPEVKFNWYVDGVEVHNAKTKPCEEQYGSTYRCVSVLTVLHQDWLNGKEYKCKVSNKALPAPIEKTISKAKGQPREPQVYTLPPSREEMTKNQVSLTCLVKGFYPSDIAVEWESNGQPENNYKTTPPVLDSDGSFFLYSKLTVDKSRWQQGNVFSCSVMHEALHNHYTQKSLSLSPGK

SEQ ID NO: 613 - protein, 459 aa, synthetic construct
  REGION 1..459: note = source = /note="Description of Artificial Sequence: Synthetic polypeptide"
QMQLVQSGAEVKKPGASVKVSCKASGYTFTSYDINWVRQATGQGLEWMGWMNPNSGNTGYAQKFQGRVTMTRDTSISTAYMELSSLRSQDTAVYYCARGGDYVWGSYRPYYYYYGMDVWGQGTTVTVSSASTKGPSVFPLAPSSKSTSGGTAALGCLVKDYFPEPVTVSWNSGALTSGVHTFPAVLQSSGLYSLSSVVTVPSSSLGTQTYICNVNHKPSNTKVDKKVEPKSCDKTHTCPPCPAPELLGGPSVFLFPPKPKDTLMISRTPEVTCVVVDVSHEDPEVKFNWYVDGVEVHNAKTKPCEEQYGSTYRCVSVLTVLHQDWLNGKEYKCKVSNKALPAPIEKTISKAKGQPREPQVYTLPPSREEMTKNQVSLTCLVKGFYPSDIAVEWESNGQPENNYKTTPPVLDSDGSFFLYSKLTVDKSRWQQGNVFSCSVMHEALHNHYTQKSLSLSPGK

SEQ ID NO: 614 - protein, 451 aa, synthetic construct
  REGION 1..451: note = source = /note="Description of Artificial Sequence: Synthetic polypeptide"
QVQLVESGGGVVQPGRSLRLSCAASGFTFSSYGIHWVRQAPGKGLEWVAVIWYDASNKFHADAVKGRFTISRDNSKNTLYLQMNSLRAEDSAMYFCARGKVAGMPEAFEIWGQGTKVTVSSASTKGPSVFPLAPSSKSTSGGTAALGCLVKDYFPEPVTVSWNSGALTSGVHTFPAVLQSSGLYSLSSVVTVPSSSLGTQTYICNVNHKPSNTKVDKKVEPKSCDKTHTCPPCPAPELLGGPSVFLFPPKPKDTLMISRTPEVTCVVVDVSHEDPEVKFNWYVDGVEVHNAKTKPCEEQYGSTYRCVSVLTVLHQDWLNGKEYKCKVSNKALPAPIEKTISKAKGQPREPQVYTLPPSREEMTKNQVSLTCLVKGFYPSDIAVEWESNGQPENNYKTTPPVLDSDGSFFLYSKLTVDKSRWQQGNVFSCSVMHEALHNHYTQKSLSLSPGK

SEQ ID NO: 615 - protein, 451 aa, synthetic construct
  REGION 1..451: note = source = /note="Description of Artificial Sequence: Synthetic polypeptide"
QVQLVESGGGVVQPGRSLRLSCTASGFTFSSYGIHWVRQAPGKGLEWVAVIWYDASNKFHADAVKGRFTISRDNSKNTLYLQMNSLRAEDSAMYFCARGKVAGMPEAFEIWGQGTKVTVSSASTKGPSVFPLAPSSKSTSGGTAALGCLVKDYFPEPVTVSWNSGALTSGVHTFPAVLQSSGLYSLSSVVTVPSSSLGTQTYICNVNHKPSNTKVDKKVEPKSCDKTHTCPPCPAPELLGGPSVFLFPPKPKDTLMISRTPEVTCVVVDVSHEDPEVKFNWYVDGVEVHNAKTKPCEEQYGSTYRCVSVLTVLHQDWLNGKEYKCKVSNKALPAPIEKTISKAKGQPREPQVYTLPPSREEMTKNQVSLTCLVKGFYPSDIAVEWESNGQPENNYKTTPPVLDSDGSFFLYSKLTVDKSRWQQGNVFSCSVMHEALHNHYTQKSLSLSPGK

SEQ ID NO: 616 - protein, 451 aa, synthetic construct; identical to SEQ ID NO: 614
  REGION 1..451: note = source = /note="Description of Artificial Sequence: Synthetic polypeptide"

SEQ ID NO: 617 - protein, 451 aa, synthetic construct
  REGION 1..451: note = source = /note="Description of Artificial Sequence: Synthetic polypeptide"
QVQLVESGGGVVQPGRSLRLSCAASGFTFSSYGIHWVRQAPGKGLEWVAVIWYDASNKFHADAVKGRFTISRDNSKNTLYLQMNSLRAEDSAMYFCARGKVAGMPEAFEIWGQGTLVTVSSASTKGPSVFPLAPSSKSTSGGTAALGCLVKDYFPEPVTVSWNSGALTSGVHTFPAVLQSSGLYSLSSVVTVPSSSLGTQTYICNVNHKPSNTKVDKKVEPKSCDKTHTCPPCPAPELLGGPSVFLFPPKPKDTLMISRTPEVTCVVVDVSHEDPEVKFNWYVDGVEVHNAKTKPCEEQYGSTYRCVSVLTVLHQDWLNGKEYKCKVSNKALPAPIEKTISKAKGQPREPQVYTLPPSREEMTKNQVSLTCLVKGFYPSDIAVEWESNGQPENNYKTTPPVLDSDGSFFLYSKLTVDKSRWQQGNVFSCSVMHEALHNHYTQKSLSLSPGK

SEQ ID NO: 618 - protein, 451 aa, synthetic construct
  REGION 1..451: note = source = /note="Description of Artificial Sequence: Synthetic polypeptide"
QVQLVESGGGVVQPGRSLRLSCAASGFTFSSYGIHWVRQAPGKGLEWVAVIWYDASNKFHADSVKGRFTISRDNSKNTLYLQMNSLRAEDSAMYFCARGKVAGMPEAFEIWGQGTKVTVSSASTKGPSVFPLAPSSKSTSGGTAALGCLVKDYFPEPVTVSWNSGALTSGVHTFPAVLQSSGLYSLSSVVTVPSSSLGTQTYICNVNHKPSNTKVDKKVEPKSCDKTHTCPPCPAPELLGGPSVFLFPPKPKDTLMISRTPEVTCVVVDVSHEDPEVKFNWYVDGVEVHNAKTKPCEEQYGSTYRCVSVLTVLHQDWLNGKEYKCKVSNKALPAPIEKTISKAKGQPREPQVYTLPPSREEMTKNQVSLTCLVKGFYPSDIAVEWESNGQPENNYKTTPPVLDSDGSFFLYSKLTVDKSRWQQGNVFSCSVMHEALHNHYTQKSLSLSPGK

SEQ ID NO: 619 - protein, 451 aa, synthetic construct
  REGION 1..451: note = source = /note="Description of Artificial Sequence: Synthetic polypeptide"
QVQLVESGGGVVQPGRSLRLSCAASGFTFSSYGIHWVRQAPGKGLEWVAVIWYDGSNKFHADAVKGRFTISRDNSKNTLYLQMNSLRAEDSAMYFCARGKVAGMPEAFEIWGQGTKVTVSSASTKGPSVFPLAPSSKSTSGGTAALGCLVKDYFPEPVTVSWNSGALTSGVHTFPAVLQSSGLYSLSSVVTVPSSSLGTQTYICNVNHKPSNTKVDKKVEPKSCDKTHTCPPCPAPELLGGPSVFLFPPKPKDTLMISRTPEVTCVVVDVSHEDPEVKFNWYVDGVEVHNAKTKPCEEQYGSTYRCVSVLTVLHQDWLNGKEYKCKVSNKALPAPIEKTISKAKGQPREPQVYTLPPSREEMTKNQVSLTCLVKGFYPSDIAVEWESNGQPENNYKTTPPVLDSDGSFFLYSKLTVDKSRWQQGNVFSCSVMHEALHNHYTQKSLSLSPGK

SEQ ID NO: 620 - protein, 459 aa, synthetic construct
  REGION 1..459: note = source = /note="Description of Artificial Sequence: Synthetic polypeptide"
QMQLVQSGAEVKKPGASVKVSCKASGYTFTSYDINWVRQATGQGLEWMGWMNPNSGGTGYAQKFQGRVTMTRDTSISTAYMELSSLRSQDTAVYYCARGGDYVWGSYRPYYYYYGMDVWGQGTTVTVSSASTKGPSVFPLAPSSKSTSGGTAALGCLVKDYFPEPVTVSWNSGALTSGVHTFPAVLQSSGLYSLSSVVTVPSSSLGTQTYICNVNHKPSNTKVDKKVEPKSCDKTHTCPPCPAPELLGGPSVFLFPPKPKDTLMISRTPEVTCVVVDVSHEDPEVKFNWYVDGVEVHNAKTKPCEEQYGSTYRCVSVLTVLHQDWLNGKEYKCKVSNKALPAPIEKTISKAKGQPREPQVYTLPPSREEMTKNQVSLTCLVKGFYPSDIAVEWESNGQPENNYKTTPPVLDSDGSFFLYSKLTVDKSRWQQGNVFSCSVMHEALHNHYTQKSLSLSPGK

SEQ ID NO: 621 - protein, 459 aa, synthetic construct; identical to SEQ ID NO: 613
  REGION 1..459: note = source = /note="Description of Artificial Sequence: Synthetic polypeptide"

SEQ ID NO: 622 - protein, 459 aa, synthetic construct; identical to SEQ ID NO: 620
  REGION 1..459: note = source = /note="Description of Artificial Sequence: Synthetic polypeptide"

SEQ ID NO: 623 - protein, 459 aa, synthetic construct
  REGION 1..459: note = source = /note="Description of Artificial Sequence: Synthetic polypeptide"
QMQLVQSGAEVKKPGASVKVSCKASGYTFTSYDINWVRQAPGQGLEWMGWMNPNSGGTGYAQKFQGRVTMTRDTSISTAYMELSSLRSDDTAVYYCARGGDYVWGSYRPYYYYYGMDVWGQGTTVTVSSASTKGPSVFPLAPSSKSTSGGTAALGCLVKDYFPEPVTVSWNSGALTSGVHTFPAVLQSSGLYSLSSVVTVPSSSLGTQTYICNVNHKPSNTKVDKKVEPKSCDKTHTCPPCPAPELLGGPSVFLFPPKPKDTLMISRTPEVTCVVVDVSHEDPEVKFNWYVDGVEVHNAKTKPCEEQYGSTYRCVSVLTVLHQDWLNGKEYKCKVSNKALPAPIEKTISKAKGQPREPQVYTLPPSREEMTKNQVSLTCLVKGFYPSDIAVEWESNGQPENNYKTTPPVLDSDGSFFLYSKLTVDKSRWQQGNVFSCSVMHEALHNHYTQKSLSLSPGK

SEQ ID NO: 624 - protein, 459 aa, synthetic construct; identical to SEQ ID NO: 620
  REGION 1..459: note = source = /note="Description of Artificial Sequence: Synthetic polypeptide"

SEQ ID NO: 625 - protein, 459 aa, synthetic construct
  REGION 1..459: note = source = /note="Description of Artificial Sequence: Synthetic polypeptide"
QMQLVQSGAEVKKPGASVKVSCKASGYTFTSYDINWVRQAPGQGLEWMGWMNPNSGNTGYAQKFQGRVTMTRDTSISTAYMELSSLRSDDTAVYYCARGGDYVWGSYRPYYYYYGMDVWGQGTTVTVSSASTKGPSVFPLAPSSKSTSGGTAALGCLVKDYFPEPVTVSWNSGALTSGVHTFPAVLQSSGLYSLSSVVTVPSSSLGTQTYICNVNHKPSNTKVDKKVEPKSCDKTHTCPPCPAPELLGGPSVFLFPPKPKDTLMISRTPEVTCVVVDVSHEDPEVKFNWYVDGVEVHNAKTKPCEEQYGSTYRCVSVLTVLHQDWLNGKEYKCKVSNKALPAPIEKTISKAKGQPREPQVYTLPPSREEMTKNQVSLTCLVKGFYPSDIAVEWESNGQPENNYKTTPPVLDSDGSFFLYSKLTVDKSRWQQGNVFSCSVMHEALHNHYTQKSLSLSPGK

SEQ ID NO: 626 - protein, 459 aa, synthetic construct
  REGION 1..459: note = source = /note="Description of Artificial Sequence: Synthetic polypeptide"
QMQLVQSGAEVKKPGASVKVSCKASGYTFTSYDINWVRQATGQGLEWMGWMNPNSGGTGYAQKFQGRVTMTRDTSISTAYMELSSLRSQDTAVYYCARGGDYVFGSYRPYYYYYGMDVWGQGTTVTVSSASTKGPSVFPLAPSSKSTSGGTAALGCLVKDYFPEPVTVSWNSGALTSGVHTFPAVLQSSGLYSLSSVVTVPSSSLGTQTYICNVNHKPSNTKVDKKVEPKSCDKTHTCPPCPAPELLGGPSVFLFPPKPKDTLMISRTPEVTCVVVDVSHEDPEVKFNWYVDGVEVHNAKTKPCEEQYGSTYRCVSVLTVLHQDWLNGKEYKCKVSNKALPAPIEKTISKAKGQPREPQVYTLPPSREEMTKNQVSLTCLVKGFYPSDIAVEWESNGQPENNYKTTPPVLDSDGSFFLYSKLTVDKSRWQQGNVFSCSVMHEALHNHYTQKSLSLSPGK

SEQ ID NO: 627 - protein, 459 aa, synthetic construct
  REGION 1..459: note = source = /note="Description of Artificial Sequence: Synthetic polypeptide"
QMQLVQSGAEVKKPGASVKVSCKASGYTFTSYDINWVRQAPGQGLEWMGWMNPNSGGTGYAQKFQGRVTMTRDTSISTAYMELSSLRSDDTAVYYCARGGDYVFGSYRPYYYYYGMDVWGQGTTVTVSSASTKGPSVFPLAPSSKSTSGGTAALGCLVKDYFPEPVTVSWNSGALTSGVHTFPAVLQSSGLYSLSSVVTVPSSSLGTQTYICNVNHKPSNTKVDKKVEPKSCDKTHTCPPCPAPELLGGPSVFLFPPKPKDTLMISRTPEVTCVVVDVSHEDPEVKFNWYVDGVEVHNAKTKPCEEQYGSTYRCVSVLTVLHQDWLNGKEYKCKVSNKALPAPIEKTISKAKGQPREPQVYTLPPSREEMTKNQVSLTCLVKGFYPSDIAVEWESNGQPENNYKTTPPVLDSDGSFFLYSKLTVDKSRWQQGNVFSCSVMHEALHNHYTQKSLSLSPGK

SEQ ID NO: 628 - protein, 451 aa, synthetic construct; identical to SEQ ID NO: 617
  REGION 1..451: note = source = /note="Description of Artificial Sequence: Synthetic polypeptide"

SEQ ID NO: 629 - protein, 13 aa, synthetic construct
  REGION 1..13: note = source = /note="Description of Artificial Sequence: Synthetic peptide"
SGSSSNIGSNTVN

SEQ ID NO: 630 - protein, 11 aa, synthetic construct
  REGION 1..11: note = source = /note="Description of Artificial Sequence: Synthetic peptide"
RASQDIRDYLG

SEQ ID NO: 631 - protein, 11 aa, synthetic construct
  REGION 1..11: note = source = /note="Description of Artificial Sequence: Synthetic peptide"
RASQDIRDYLG

SEQ ID NO: 632 - protein, 11 aa, synthetic construct
  REGION 1..11: note = source = /note="Description of Artificial Sequence: Synthetic peptide"
QASQDISNYLN

SEQ ID NO: 633 - protein, 17 aa, synthetic construct
  REGION 1..17: note = source = /note="Description of Artificial Sequence: Synthetic peptide"
KSSQSVLSSSNNKNYIA

SEQ ID NO: 634 - protein, 17 aa, synthetic construct
  REGION 1..17: note = source = /note="Description of Artificial Sequence: Synthetic peptide"
KSSQSVLSSSNNKNYIA

SEQ ID NO: 635 - protein, 17 aa, synthetic construct
  REGION 1..17: note = source = /note="Description of Artificial Sequence: Synthetic peptide"
KSSQSVLSSSNNKNYLA

SEQ ID NO: 636 - protein, 17 aa, synthetic construct
  REGION 1..17: note = source = /note="Description of Artificial Sequence: Synthetic peptide"
KSSQSVLSSSNNKNYLA

SEQ ID NO: 637 - protein, 12 aa, synthetic construct
  REGION 1..12: note = source = /note="Description of Artificial Sequence: Synthetic peptide"
RASQSISYSYLA

SEQ ID NO: 638 - protein, 11 aa, synthetic construct
  REGION 1..11: note = source = /note="Description of Artificial Sequence: Synthetic peptide"
RASQSVSSNLA

SEQ ID NO: 639 - protein, 11 aa, synthetic construct
  REGION 1..11: note = source = /note="Description of Artificial Sequence: Synthetic peptide"
RASQGIRNELG

SEQ ID NO: 640 - protein, 11 aa, synthetic construct
  REGION 1..11: note = source = /note="Description of Artificial Sequence: Synthetic peptide"
QASQDITNYLN

SEQ ID NO: 641 - protein, 11 aa, synthetic construct
  REGION 1..11: note = source = /note="Description of Artificial Sequence: Synthetic peptide"
RASQGLIIWLA

SEQ ID NO: 642 - protein, 11 aa, synthetic construct
  REGION 1..11: note = source = /note="Description of Artificial Sequence: Synthetic peptide"
RASQGLIIWLA

SEQ ID NO: 643 - protein, 11 aa, synthetic construct
  REGION 1..11: note = source = /note="Description of Artificial Sequence: Synthetic peptide"
RASQGIRNELG

SEQ ID NO: 644 - protein, 11 aa, synthetic construct
  REGION 1..11: note = source = /note="Description of Artificial Sequence: Synthetic peptide"
RASQGIRNELG

SEQ ID NO: 645 - protein, 11 aa, synthetic construct
  REGION 1..11: note = source = /note="Description of Artificial Sequence: Synthetic peptide"
RASQGIRNELG

SEQ ID NO: 646 - protein, 11 aa, synthetic construct
  REGION 1..11: note = source = /note="Description of Artificial Sequence: Synthetic peptide"
RASQGIRNELG

SEQ ID NO: 647 - protein, 11 aa, synthetic construct
  REGION 1..11: note = source = /note="Description of Artificial Sequence: Synthetic peptide"
RASQGIRNELG

SEQ ID NO: 648 - protein, 11 aa, synthetic construct
  REGION 1..11: note = source = /note="Description of Artificial Sequence: Synthetic peptide"
RASQGIRNELG

SEQ ID NO: 649 - protein, 11 aa, synthetic construct
  REGION 1..11: note = source = /note="Description of Artificial Sequence: Synthetic peptide"
RASQDIRDYLG

SEQ ID NO: 650 - protein, 11 aa, synthetic construct
  REGION 1..11: note = source = /note="Description of Artificial Sequence: Synthetic peptide"
RASQDIRDYLG

SEQ ID NO: 651 - protein, 11 aa, synthetic construct
  REGION 1..11: note = source = /note="Description of Artificial Sequence: Synthetic peptide"
RASQDIRDYLG

SEQ ID NO: 652 - protein, 11 aa, synthetic construct
  REGION 1..11: note = source = /note="Description of Artificial Sequence: Synthetic peptide"
RASQDIRDYLG

SEQ ID NO: 653 - protein, 11 aa, synthetic construct
  REGION 1..11: note = source = /note="Description of Artificial Sequence: Synthetic peptide"
RASQDIRDYLG

SEQ ID NO: 654 - protein, 11 aa, synthetic construct
  REGION 1..11: note = source = /note="Description of Artificial Sequence: Synthetic peptide"
RASQDIRDYLG

SEQ ID NO: 655 - protein, 11 aa, synthetic construct
  REGION 1..11: note = source = /note="Description of Artificial Sequence: Synthetic peptide"
RASQDIRDYLG

SEQ ID NO: 656 - protein, 11 aa, synthetic construct
  REGION 1..11: note = source = /note="Description of Artificial Sequence: Synthetic peptide"
RASQDLRNYLG

SEQ ID NO: 657 - protein, 11 aa, synthetic construct
  REGION 1..11: note = source = /note="Description of Artificial Sequence: Synthetic peptide"
RASQDLRNYLG

SEQ ID NO: 658 - protein, 11 aa, synthetic construct
  REGION 1..11: note = source = /note="Description of Artificial Sequence: Synthetic peptide"
RASQDLRNYLG

SEQ ID NO: 659 - protein, 11 aa, synthetic construct
  REGION 1..11: note = source = /note="Description of Artificial Sequence: Synthetic peptide"
RASQDLRNYLG

SEQ ID NO: 660 - protein, 11 aa, synthetic construct
  REGION 1..11: note = source = /note="Description of Artificial Sequence: Synthetic peptide"
RASQDLRNYLG

SEQ ID NO: 661 - protein, 11 aa, synthetic construct
  REGION 1..11: note = source = /note="Description of Artificial Sequence: Synthetic peptide"
RASQDLRNYLG

SEQ ID NO: 662 - protein, 11 aa, synthetic construct
  REGION 1..11: note = source = /note="Description of Artificial Sequence: Synthetic peptide"
RASQDLRNYLG

SEQ ID NO: 663 - protein, 11 aa, synthetic construct
  REGION 1..11: note = source = /note="Description of Artificial Sequence: Synthetic peptide"
RASQDLRNYLG

SEQ ID NO: 664 - protein, 11 aa, synthetic construct
  REGION 1..11: note = source = /note="Description of Artificial Sequence: Synthetic peptide"
RASQDLRNYLG

SEQ ID NO: 665 - protein, 11 aa, synthetic construct
  REGION 1..11: note = source = /note="Description of Artificial Sequence: Synthetic peptide"
RASQDLRNYLG

SEQ ID NO: 666 - protein, 11 aa, synthetic construct
  REGION 1..11: note = source = /note="Description of Artificial Sequence: Synthetic peptide"
RASQDLRNYLG

SEQ ID NO: 667 - protein, 11 aa, synthetic construct
  REGION 1..11: note = source = /note="Description of Artificial Sequence: Synthetic peptide"
RASQDLRNYLG

SEQ ID NO: 668 - protein, 11 aa, synthetic construct
  REGION 1..11: note = source = /note="Description of Artificial Sequence: Synthetic peptide"
QASQDISNYLN

SEQ ID NO: 669 - protein, 11 aa, synthetic construct
  REGION 1..11: note = source = /note="Description of Artificial Sequence: Synthetic peptide"
QASQDISNYLN

SEQ ID NO: 670 - protein, 11 aa, synthetic construct
  REGION 1..11: note = source = /note="Description of Artificial Sequence: Synthetic peptide"
QASQDISNYLN

SEQ ID NO: 671 - protein, 11 aa, synthetic construct
  REGION 1..11: note = source = /note="Description of Artificial Sequence: Synthetic peptide"
QASQDISNYLN

SEQ ID NO: 672 - protein, 11 aa, synthetic construct
  REGION 1..11: note = source = /note="Description of Artificial Sequence: Synthetic peptide"
QASQDISNYLN

SEQ ID NO: 673 - protein, 11 aa, synthetic construct
  REGION 1..11: note = source = /note="Description of Artificial Sequence: Synthetic peptide"
QASQDISNYLN

SEQ ID NO: 674 - protein, 11 aa, synthetic construct
  REGION 1..11: note = source = /note="Description of Artificial Sequence: Synthetic peptide"
QASQDISNYLN

SEQ ID NO: 675 - protein, 11 aa, synthetic construct
  REGION 1..11: note = source = /note="Description of Artificial Sequence: Synthetic peptide"
QASQDISNYLN

SEQ ID NO: 676 - protein, 11 aa, synthetic construct
  REGION 1..11: note = source = /note="Description of Artificial Sequence: Synthetic peptide"
QASQDISNYLN

SEQ ID NO: 677 - protein, 11 aa, synthetic construct
  REGION 1..11: note = source = /note="Description of Artificial Sequence: Synthetic peptide"
RASQDIRDYLG

SEQ ID NO: 678 - protein, 11 aa, synthetic construct
  REGION 1..11: note = source = /note="Description of Artificial Sequence: Synthetic peptide"
RASQDIRDYLG

SEQ ID NO: 679 - protein, 11 aa, synthetic construct
  REGION 1..11: note = source = /note="Description of Artificial Sequence: Synthetic peptide"
RASQDIRDYLG

SEQ ID NO: 680 - protein, 11 aa, synthetic construct
  REGION 1..11: note = source = /note="Description of Artificial Sequence: Synthetic peptide"
RASQDIRDYLG

SEQ ID NO: 681 - protein, 11 aa, synthetic construct
  REGION 1..11: note = source = /note="Description of Artificial Sequence: Synthetic peptide"
RASQDIRDYLG

SEQ ID NO: 682 - protein, 11 aa, synthetic construct
  REGION 1..11: note = source = /note="Description of Artificial Sequence: Synthetic peptide"
RASQDIRDYLG

SEQ ID NO: 683 - protein, 11 aa, synthetic construct
  REGION 1..11: note = source = /note="Description of Artificial Sequence: Synthetic peptide"
RASQDIRDYLG

SEQ ID NO: 684 - protein, 11 aa, synthetic construct
  REGION 1..11: note = source = /note="Description of Artificial Sequence: Synthetic peptide"
QASQDITNYLN

SEQ ID NO: 685 - protein, 11 aa, synthetic construct
  REGION 1..11: note = source = /note="Description of Artificial Sequence: Synthetic peptide"
QASQDITNYLN

SEQ ID NO: 686 - protein, 11 aa, synthetic construct
  REGION 1..11: note = source = /note="Description of Artificial Sequence: Synthetic peptide"
QASQDITNYLN

SEQ ID NO: 687 - protein, 11 aa, synthetic construct
  REGION 1..11: note = source = /note="Description of Artificial Sequence: Synthetic peptide"
QASQDITNYLN

SEQ ID NO: 688 - protein, 11 aa, synthetic construct
  REGION 1..11: note = source = /note="Description of Artificial Sequence: Synthetic peptide"
QASQDITNYLN

SEQ ID NO: 689 - protein, 11 aa, synthetic construct
  REGION 1..11: note = source = /note="Description of Artificial Sequence: Synthetic peptide"
QASQDITNYLN

SEQ ID NO: 690 - protein, 11 aa, synthetic construct
  REGION 1..11: note = source = /note="Description of Artificial Sequence: Synthetic peptide"
QASQDITNYLN

SEQ ID NO: 691 - protein, 11 aa, synthetic construct
  REGION 1..11: note = source = /note="Description of Artificial Sequence: Synthetic peptide"
QASQDITNYLN

SEQ ID NO: 692 - protein, 11 aa, synthetic construct
  REGION 1..11: note = source = /note="Description of Artificial Sequence: Synthetic peptide"
QASQDITNYLN

SEQ ID NO: 693 - protein, 11 aa, synthetic construct
  REGION 1..11: note = source = /note="Description of Artificial Sequence: Synthetic peptide"
QASQDITNYLN

SEQ ID NO: 694 - protein, 11 aa, synthetic construct
  REGION 1..11: note = source = /note="Description of Artificial Sequence: Synthetic peptide"
QASQDITNYLN

SEQ ID NO: 695 - protein, 12 aa, synthetic construct
  REGION 1..12: note = source = /note="Description of Artificial Sequence: Synthetic peptide"
RASQIFTSTYLA

SEQ ID NO: 696 - protein, 12 aa, synthetic construct
  REGION 1..12: note = source = /note="Description of Artificial Sequence: Synthetic peptide"
RASQIFTSTYLA

SEQ ID NO: 697 - protein, 12 aa, synthetic construct
  REGION 1..12: note = source = /note="Description of Artificial Sequence: Synthetic peptide"
RASQIFTSTYLA

SEQ ID NO: 698 - protein, 12 aa, synthetic construct
  REGION 1..12: note = source = /note="Description of Artificial Sequence: Synthetic peptide"
RASQIFTSTYLA

SEQ ID NO: 699 - protein, 11 aa, synthetic construct
  REGION 1..11: note = source = /note="Description of Artificial Sequence: Synthetic peptide"
RASQSVSSNLA

SEQ ID NO: 700 - protein, 11 aa, synthetic construct
  REGION 1..11: note = source = /note="Description of Artificial Sequence: Synthetic peptide"
RASQSVSSNLA

SEQ ID NO: 701 - protein, 11 aa, synthetic construct
  REGION 1..11: note = source = /note="Description of Artificial Sequence: Synthetic peptide"
RASQSVSSNLA

SEQ ID NO: 702 - protein, 11 aa, synthetic construct
  REGION 1..11: note = source = /note="Description of Artificial Sequence: Synthetic peptide"
RASQSVSSNLA

SEQ ID NO: 703 - protein, 11 aa, synthetic construct
  REGION 1..11: note = source = /note="Description of Artificial Sequence: Synthetic peptide"
RASQSVSSNLA

SEQ ID NO: 704 - protein, 11 aa, synthetic construct
  REGION 1..11: note = source = /note="Description of Artificial Sequence: Synthetic peptide"
RASQSVSSNLA

SEQ ID NO: 705 - protein, 11 aa, synthetic construct
  REGION 1..11: note = source = /note="Description of Artificial Sequence: Synthetic peptide"
RASQSVSSNLA

SEQ ID NO: 706 - protein, 11 aa, synthetic construct
  REGION 1..11: note = source = /note="Description of Artificial Sequence: Synthetic peptide"
RASQSVSSNLA

SEQ ID NO: 707 - protein, 12 aa, synthetic construct
  REGION 1..12: note = source = /note="Description of Artificial Sequence: Synthetic peptide"
RASQSISYSYLA

SEQ ID NO: 708 - protein, 12 aa, synthetic construct
  REGION 1..12: note = source = /note="Description of Artificial Sequence: Synthetic peptide"
RASQSISYSYLA

SEQ ID NO: 709 - protein, 12 aa, synthetic construct
  REGION 1..12: note = source = /note="Description of Artificial Sequence: Synthetic peptide"
RASQSISYSYLA

SEQ ID NO: 710 - protein, 12 aa, synthetic construct
  REGION 1..12: note = source = /note="Description of Artificial Sequence: Synthetic peptide"
RASQSISYSYLA

SEQ ID NO: 711 - protein, 12 aa, synthetic construct
  REGION 1..12: note = source = /note="Description of Artificial Sequence: Synthetic peptide"
RASQSISYSYLA

SEQ ID NO: 712 - protein, 12 aa, synthetic construct
  REGION 1..12: note = source = /note="Description of Artificial Sequence: Synthetic peptide"
RASQSISYSYLA

SEQ ID NO: 713 - protein, 12 aa, synthetic construct
  REGION 1..12: note = source = /note="Description of Artificial Sequence: Synthetic peptide"
RASQSISYSYLA

SEQ ID NO: 714 - protein, 17 aa, synthetic construct
  REGION 1..17: note = source = /note="Description of Artificial Sequence: Synthetic peptide"
KSSQSVLSSSNNKNYIA

SEQ ID NO: 715 - protein, 17 aa, synthetic construct
  REGION 1..17: note = source = /note="Description of Artificial Sequence: Synthetic peptide"
KSSQSVLSSSNNKNYIA

SEQ ID NO: 716 - protein, 17 aa, synthetic construct
  REGION 1..17: note = source = /note="Description of Artificial Sequence: Synthetic peptide"
KSSQSVLSSSNNKNYIA

SEQ ID NO: 717 - protein, 17 aa, synthetic construct
  REGION 1..17: note = source = /note="Description of Artificial Sequence: Synthetic peptide"
KSSQSVLSSSNNKNYIA

SEQ ID NO: 718 - protein, 17 aa, synthetic construct
  REGION 1..17: note = source = /note="Description of Artificial Sequence: Synthetic peptide"
KSSQSVLSSSNNKNYIA

SEQ ID NO: 719 - protein, 17 aa, synthetic construct
  REGION 1..17: note = source = /note="Description of Artificial Sequence: Synthetic peptide"
KSSQSVLSSSNNKNYIA

SEQ ID NO: 720 - protein, 17 aa, synthetic construct
  REGION 1..17: note = source = /note="Description of Artificial Sequence: Synthetic peptide"
KSSQSVLSSSNNKNYIA

SEQ ID NO: 721 - protein, 17 aa, synthetic construct
  REGION 1..17: note = source = /note="Description of Artificial Sequence: Synthetic peptide"
KSSQSVLSSSNNKNYIA

SEQ ID NO: 722 - protein, 17 aa, synthetic construct
  REGION 1..17: note = source = /note="Description of Artificial Sequence: Synthetic peptide"
KSSQSVLSSSNNKNYIA

SEQ ID NO: 723 - protein, 17 aa, synthetic construct
  REGION 1..17: note = source = /note="Description of Artificial Sequence: Synthetic peptide"
KSSQSVLSSSNNKNYIA

SEQ ID NO: 724 - protein, 17 aa, synthetic construct
  REGION 1..17: note = source = /note="Description of Artificial Sequence: Synthetic peptide"
KSSQSVLSSSNNKNYIA

SEQ ID NO: 725 - protein, 17 aa, synthetic construct
  REGION 1..17: note = source = /note="Description of Artificial Sequence: Synthetic peptide"
KSSQSVLSSSNNKNYLA

SEQ ID NO: 726 - protein, 17 aa, synthetic construct
  REGION 1..17: note = source = /note="Description of Artificial Sequence: Synthetic peptide"
KSSQSVLSSSNNKNYLA

SEQ ID NO: 727 - protein, 17 aa, synthetic construct
  REGION 1..17: note = source = /note="Description of Artificial Sequence: Synthetic peptide"
KSSQSVLSSSNNKNYLA

SEQ ID NO: 728 - protein, 17 aa, synthetic construct
  REGION 1..17: note = source = /note="Description of Artificial Sequence: Synthetic peptide"
KSSQSVLSSSNNKNYLA

SEQ ID NO: 729 - protein, 17 aa, synthetic construct
  REGION 1..17: note = source = /note="Description of Artificial Sequence: Synthetic peptide"
KSSQSVLSSSNNKNYLA

SEQ ID NO: 730 - protein, 17 aa, synthetic construct
  REGION 1..17: note = source = /note="Description of Artificial Sequence: Synthetic peptide"
KSSQSVLSSSNNKNYLA

SEQ ID NO: 731 - protein, 17 aa, synthetic construct
  REGION 1..17: note = source = /note="Description of Artificial Sequence: Synthetic peptide"
KSSQSVLSSSNNKNYLA

SEQ ID NO: 732 - protein, 17 aa, synthetic construct
  REGION 1..17: note = source = /note="Description of Artificial Sequence: Synthetic peptide"
KSSQSVLSSSNNKNYLA

SEQ ID NO: 733 - protein, 17 aa, synthetic construct
  REGION 1..17: note = source = /note="Description of Artificial Sequence: Synthetic peptide"
KSSQSVLSSSNNKNYLA

SEQ ID NO: 734 - protein, 17 aa, synthetic construct
  REGION 1..17: note = source = /note="Description of Artificial Sequence: Synthetic peptide"
KSSQSVLSSSNNKNYIA

SEQ ID NO: 735 - protein, 17 aa, synthetic construct
  REGION 1..17: note = source = /note="Description of Artificial Sequence: Synthetic peptide"
KSSQSVLSSSNNKNYIA

SEQ ID NO: 736 - protein, 17 aa, synthetic construct
  REGION 1..17: note = source = /note="Description of Artificial Sequence: Synthetic peptide"
KSSQSVLSSSNNKNYIA

SEQ ID NO: 737 - protein, 17 aa, synthetic construct
  REGION 1..17: note = source = /note="Description of Artificial Sequence: Synthetic peptide"
KSSQSVLSSSNNKNYIA

SEQ ID NO: 738 - protein, 17 aa, synthetic construct
  REGION 1..17: note = source = /note="Description of Artificial Sequence: Synthetic peptide"
KSSQSVLSSSNNKNYIA

SEQ ID NO: 739 - protein, 17 aa, synthetic construct
  REGION 1..17: note = source = /note="Description of Artificial Sequence: Synthetic peptide"
KSSQSVLSSSNNKNYLA

SEQ ID NO: 740 - protein, 17 aa, synthetic construct
  REGION 1..17: note = source = /note="Description of Artificial Sequence: Synthetic peptide"
KSSQSVLSSSNNKNYLA

SEQ ID NO: 741 - protein, 17 aa, synthetic construct
  REGION 1..17: note = source = /note="Description of Artificial Sequence: Synthetic peptide"
KSSQSVLSSSNNKNYLA

SEQ ID NO: 742 - protein, 17 aa, synthetic construct
  REGION 1..17: note = source = /note="Description of Artificial Sequence: Synthetic peptide"
KSSQSVLSSSNNKNYLA

SEQ ID NO: 743 - protein, 17 aa, synthetic construct
  REGION 1..17: note = source = /note="Description of Artificial Sequence: Synthetic peptide"
KSSQSVLSSSNNKNYLA

SEQ ID NO: 744 - protein, 17 aa, synthetic construct
  REGION 1..17: note = source = /note="Description of Artificial Sequence: Synthetic peptide"
KSSQSVLSSSNNKNYLA

SEQ ID NO: 745 - protein, 17 aa, synthetic construct
  REGION 1..17: note = source = /note="Description of Artificial Sequence: Synthetic peptide"
KSSQSVLSSSNNKNYLA

SEQ ID NO: 746 - protein, 17 aa, synthetic construct
  REGION 1..17: note = source = /note="Description of Artificial Sequence: Synthetic peptide"
KSSQSVLSSSNNKNYLA

SEQ ID NO: 747 - protein, 17 aa, synthetic construct
  REGION 1..17: note = source = /note="Description of Artificial Sequence: Synthetic peptide"
KSSQSVLSSSNNKNYLA

SEQ ID NO: 748 - protein, 17 aa, synthetic construct
  REGION 1..17: note = source = /note="Description of Artificial Sequence: Synthetic peptide"
KSSQSVLSSSNNKNYLA

SEQ ID NO: 749 - protein, 17 aa, synthetic construct
  REGION 1..17: note = source = /note="Description of Artificial Sequence: Synthetic peptide"
KSSQSVLSSSNNKNYLA

SEQ ID NO: 750 - protein, 17 aa, synthetic construct
  REGION 1..17: note = source = /note="Description of Artificial Sequence: Synthetic peptide"
KSSQSVLSSSNNKNYLA

SEQ ID NO: 751 - protein, 17 aa, synthetic construct
  REGION 1..17: note = source = /note="Description of Artificial Sequence: Synthetic peptide"
KSSQSVLSSSNNKNYLA

SEQ ID NO: 752 - protein, 13 aa, synthetic construct
  REGION 1..13: note = source = /note="Description of Artificial Sequence: Synthetic peptide"
SGSSSNIGSQTVN

SEQ ID NO: 753 - protein, 13 aa, synthetic construct
  REGION 1..13: note = source = /note="Description of Artificial Sequence: Synthetic peptide"
SGSSSNIGSQTVN

SEQ ID NO: 754 - protein, 13 aa, synthetic construct
  REGION 1..13: note = source = /note="Description of Artificial Sequence: Synthetic peptide"
SGSSSNIGSNYVN

SEQ ID NO: 755 - protein, 13 aa, synthetic construct
  REGION 1..13: note = source = /note="Description of Artificial Sequence: Synthetic peptide"
SGSSSNIGSNYVN

SEQ ID NO: 756 - protein, 13 aa, synthetic construct
  REGION 1..13: note = source = /note="Description of Artificial Sequence: Synthetic peptide"
SGSSSNIGSQTVN

SEQ ID NO: 757 - protein, 13 aa, synthetic construct
  REGION 1..13: note = source = /note="Description of Artificial Sequence: Synthetic peptide"
SGSSSNIGSNYVN

SEQ ID NO: 758 - protein, 13 aa, synthetic construct
  REGION 1..13: note = source = /note="Description of Artificial Sequence: Synthetic peptide"
SGSSSNIGSNTVN

SEQ ID NO: 759 - protein, 13 aa, synthetic construct
  REGION 1..13: note = source = /note="Description of Artificial Sequence: Synthetic peptide"
SGSSSNIGSNTVN

SEQ ID NO: 760 - protein, 13 aa, synthetic construct
  REGION 1..13: note = source = /note="Description of Artificial Sequence: Synthetic peptide"
SGSSSNIGSNTVN

SEQ ID NO: 761 - protein, 13 aa, synthetic construct
  REGION 1..13: note = source = /note="Description of Artificial Sequence: Synthetic peptide"
SGSSSNIGSNTVN

SEQ ID NO: 762 - protein, 13 aa, synthetic construct
  REGION 1..13: note = source = /note="Description of Artificial Sequence: Synthetic peptide"
SGSSSNIGSNTVN

SEQ ID NO: 763 - protein, 13 aa, synthetic construct
  REGION 1..13: note = source = /note="Description of Artificial Sequence: Synthetic peptide"
SGSSSNIGSNYVN

SEQ ID NO: 764 - protein, 13 aa, synthetic construct
  REGION 1..13: note = source = /note="Description of Artificial Sequence: Synthetic peptide"
SGSSSNIGSNYVN

SEQ ID NO: 765 - protein, 13 aa, synthetic construct
  REGION 1..13: note = source = /note="Description of Artificial Sequence: Synthetic peptide"
SGSSSNIGSQTVN

SEQ ID NO: 766 - protein, 11 aa, synthetic construct
  REGION 1..11: note = source = /note="Description of Artificial Sequence: Synthetic peptide"
RASQDLRNYLG

SEQ ID NO: 767 - protein, 11 aa, synthetic construct
  REGION 1..11: note = source = /note="Description of Artificial Sequence: Synthetic peptide"
RASQDIRDYLG

SEQ ID NO: 768 - protein, 13 aa, synthetic construct
  REGION 1..13: note = source = /note="Description of Artificial Sequence: Synthetic peptide"
SGSSSNIGSNTVN

SEQ ID NO: 769 - protein, 11 aa, synthetic construct
  REGION 1..11: note = source = /note="Description of Artificial Sequence: Synthetic peptide"
RASQTISRFLN

SEQ ID NO: 770 - protein, 13 aa, synthetic construct
  REGION 1..13: note = source = /note="Description of Artificial Sequence: Synthetic peptide"
SGSSSNIGNNYVS

SEQ ID NO: 771 - protein, 11 aa, synthetic construct
  REGION 1..11: note = source = /note="Description of Artificial Sequence: Synthetic peptide"
RASQTISRFLN

SEQ ID NO: 772 - protein, 11 aa, synthetic construct
  REGION 1..11: note = source = /note="Description of Artificial Sequence: Synthetic peptide"
RASQTISRFLN

SEQ ID NO: 773 - protein, 11 aa, synthetic construct
  REGION 1..11: note = source = /note="Description of Artificial Sequence: Synthetic peptide"
RASQTISRFLN

SEQ ID NO: 774 - protein, 11 aa, synthetic construct
  REGION 1..11: note = source = /note="Description of Artificial Sequence: Synthetic peptide"
RASQTISRFLN

SEQ ID NO: 775 - protein, 11 aa, synthetic construct
  REGION 1..11: note = source = /note="Description of Artificial Sequence: Synthetic peptide"
RASQTISRFLN

SEQ ID NO: 776 - protein, 11 aa, synthetic construct
  REGION 1..11: note = source = /note="Description of Artificial Sequence: Synthetic peptide"
RASQTISRFLN

SEQ ID NO: 777 - protein, 13 aa, synthetic construct
  REGION 1..13: note = source = /note="Description of Artificial Sequence: Synthetic peptide"
SGSSSNIGNNYVS

SEQ ID NO: 778 - protein, 13 aa, synthetic construct
  REGION 1..13: note = source = /note="Description of Artificial Sequence: Synthetic peptide"
SGSSSNIGNNYVS

SEQ ID NO: 779 - protein, 13 aa, synthetic construct
  REGION 1..13: note = source = /note="Description of Artificial Sequence: Synthetic peptide"
SGSSSNIGNNYVS

SEQ ID NO: 780 - protein, 13 aa, synthetic construct
  REGION 1..13: note = source = /note="Description of Artificial Sequence: Synthetic peptide"
SGSSSNIGNNYVS

SEQ ID NO: 781 - protein, 13 aa, synthetic construct
  REGION 1..13: note = source = /note="Description of Artificial Sequence: Synthetic peptide"
SGSSSNIGNNYVS

SEQ ID NO: 782 - protein, 13 aa, synthetic construct
  REGION 1..13: note = source = /note="Description of Artificial Sequence: Synthetic peptide"
SGSSSNIGNNYVS

SEQ ID NO: 783 - protein, 13 aa, synthetic construct
  REGION 1..13: note = source = /note="Description of Artificial Sequence: Synthetic peptide"
SGSSSNIGNNYVS

SEQ ID NO: 784 - protein, 13 aa, synthetic construct
  REGION 1..13: note = source = /note="Description of Artificial Sequence: Synthetic peptide"
SGSSSNIGNNYVS

SEQ ID NO: 785 - protein, 11 aa, synthetic construct
  REGION 1..11: note = source = /note="Description of Artificial Sequence: Synthetic peptide"
RASQTISRFLN

SEQ ID NO: 786 - protein, 7 aa, synthetic construct
  REGION 1..7: note = source = /note="Description of Artificial Sequence: Synthetic peptide"
TNNQRPS

SEQ ID NO: 787 - protein, 7 aa, synthetic construct
  REGION 1..7: note = source = /note="Description of Artificial Sequence: Synthetic peptide"
GASSLQS

SEQ ID NO: 788 - protein, 7 aa, synthetic construct
  REGION 1..7: note = source = /note="Description of Artificial Sequence: Synthetic peptide"
GASSLQS

SEQ ID NO: 789 - protein, 7 aa, synthetic construct
  REGION 1..7: note = source = /note="Description of Artificial Sequence: Synthetic peptide"
DASNLET

SEQ ID NO: 790 - protein, 7 aa, synthetic construct
  REGION 1..7: note = source = /note="Description of Artificial Sequence: Synthetic peptide"
WASTRES

SEQ ID NO: 791 - protein, 7 aa, synthetic construct
  REGION 1..7: note = source = /note="Description of Artificial Sequence: Synthetic peptide"
WASTRES

SEQ ID NO: 792 - protein, 7 aa, synthetic construct
  REGION 1..7: note = source = /note="Description of Artificial Sequence: Synthetic peptide"
WTSTRDS

SEQ ID NO: 793 - protein, 7 aa, synthetic construct
  REGION 1..7: note = source = /note="Description of Artificial Sequence: Synthetic peptide"
WTSTRDS

SEQ ID NO: 794 - protein, 7 aa, synthetic construct
  REGION 1..7: note = source = /note="Description of Artificial Sequence: Synthetic peptide"
GASSRAT

SEQ ID NO: 795 - protein, 7 aa, synthetic construct
  REGION 1..7: note = source = /note="Description of Artificial Sequence: Synthetic peptide"
GAATRAT

SEQ ID NO: 796 - protein, 7 aa, synthetic construct
  REGION 1..7: note = source = /note="Description of Artificial Sequence: Synthetic peptide"
GASSLQS

SEQ ID NO: 797 - protein, 7 aa, synthetic construct
  REGION 1..7: note = source = /note="Description of Artificial Sequence: Synthetic peptide"
DASNLEP

SEQ ID NO: 798 - protein, 7 aa, synthetic construct
  REGION 1..7: note = source = /note="Description of Artificial Sequence: Synthetic peptide"
AASSLQS

SEQ ID NO: 799 - protein, 7 aa, synthetic construct
  REGION 1..7: note = source = /note="Description of Artificial Sequence: Synthetic peptide"
AASSLQS

SEQ ID NO: 800 - protein, 7 aa, synthetic construct
  REGION 1..7: note = source = /note="Description of Artificial Sequence: Synthetic peptide"
GASSLQS

SEQ ID NO: 801 - protein, 7 aa, synthetic construct
  REGION 1..7: note = source = /note="Description of Artificial Sequence: Synthetic peptide"
GASSLQS

SEQ ID NO: 802 - protein, 7 aa, synthetic construct
  REGION 1..7: note = source = /note="Description of Artificial Sequence: Synthetic peptide"
GASSLQS

SEQ ID NO: 803 - protein, 7 aa, synthetic construct
  REGION 1..7: note = source = /note="Description of Artificial Sequence: Synthetic peptide"
GASSLQS

SEQ ID NO: 804 - protein, 7 aa, synthetic construct
  REGION 1..7: note = source = /note="Description of Artificial Sequence: Synthetic peptide"
GASSLQS

SEQ ID NO: 805 - protein, 7 aa, synthetic construct
  REGION 1..7: note = source = /note="Description of Artificial Sequence: Synthetic peptide"
GASSLQS

SEQ ID NO: 806 - protein, 7 aa, synthetic construct
  REGION 1..7: note = source = /note="Description of Artificial Sequence: Synthetic peptide"
GASSLQS

SEQ ID NO: 807 - protein, 7 aa, synthetic construct
  REGION 1..7: note = source = /note="Description of Artificial Sequence: Synthetic peptide"
GASSLQS

SEQ ID NO: 808 - protein, 7 aa, synthetic construct
  REGION 1..7: note = source = /note="Description of Artificial Sequence: Synthetic peptide"
GASSLQS

SEQ ID NO: 809 - protein, 7 aa, synthetic construct
  REGION 1..7: note = source = /note="Description of Artificial Sequence: Synthetic peptide"
GASSLQS

SEQ ID NO: 810 - protein, 7 aa, synthetic construct
  REGION 1..7: note = source = /note="Description of Artificial Sequence: Synthetic peptide"
GASSLQS

SEQ ID NO: 811 - protein, 7 aa, synthetic construct
  REGION 1..7: note = source = /note="Description of Artificial Sequence: Synthetic peptide"
GASSLQS

SEQ ID NO: 812 - protein, 7 aa, synthetic construct
  REGION 1..7: note = source = /note="Description of Artificial Sequence: Synthetic peptide"
GASSLQS

SEQ ID NO: 813 - protein, 7 aa, synthetic construct
  REGION 1..7: note = source = /note="Description of Artificial Sequence: Synthetic peptide"
GASSLQS

SEQ ID NO: 814 - protein, 7 aa, synthetic construct
  REGION 1..7: note = source = /note="Description of Artificial Sequence: Synthetic peptide"
GASSLQS

SEQ ID NO: 815 - protein, 7 aa, synthetic construct
  REGION 1..7: note = source = /note="Description of Artificial Sequence: Synthetic peptide"
GASSLQS

SEQ ID NO: 816 - protein, 7 aa, synthetic construct
  REGION 1..7: note = source = /note="Description of Artificial Sequence: Synthetic peptide"
GASSLQS

SEQ ID NO: 817 - protein, 7 aa, synthetic construct
  REGION 1..7: note = source = /note="Description of Artificial Sequence: Synthetic peptide"
GASSLQS

SEQ ID NO: 818 - protein, 7 aa, synthetic construct
  REGION 1..7: note = source = /note="Description of Artificial Sequence: Synthetic peptide"
GASSLQS

SEQ ID NO: 819 - protein, 7 aa, synthetic construct
  REGION 1..7: note = source = /note="Description of Artificial Sequence: Synthetic peptide"
GASSLQS

SEQ ID NO: 820 - protein, 7 aa, synthetic construct
  REGION 1..7: note = source = /note="Description of Artificial Sequence: Synthetic peptide"
GASSLQS

SEQ ID NO: 821 - protein, 7 aa, synthetic construct
  REGION 1..7: note = source = /note="Description of Artificial Sequence: Synthetic peptide"
GASSLQS

SEQ ID NO: 822 - protein, 7 aa, synthetic construct
  REGION 1..7: note = source = /note="Description of Artificial Sequence: Synthetic peptide"
GASSLQS

SEQ ID NO: 823 - protein, 7 aa, synthetic construct
  REGION 1..7: note = source = /note="Description of Artificial Sequence: Synthetic peptide"
GASSLQS

SEQ ID NO: 824 - protein, 7 aa, synthetic construct
  REGION 1..7: note = source = /note="Description of Artificial Sequence: Synthetic peptide"
GASSLQS

SEQ ID NO: 825 - protein, 7 aa, synthetic construct
  REGION 1..7: note = source = /note="Description of Artificial Sequence: Synthetic peptide"
DASNLET

SEQ ID NO: 826 - protein, 7 aa, synthetic construct
  REGION 1..7: note = source = /note="Description of Artificial Sequence: Synthetic peptide"
DASNLET

SEQ ID NO: 827 - protein, 7 aa, synthetic construct
  REGION 1..7: note = source = /note="Description of Artificial Sequence: Synthetic peptide"
DASNLET

SEQ ID NO: 828 - protein, 7 aa, synthetic construct
  REGION 1..7: note = source = /note="Description of Artificial Sequence: Synthetic peptide"
DASNLET

SEQ ID NO: 829 - protein, 7 aa, synthetic construct
  REGION 1..7: note = source = /note="Description of Artificial Sequence: Synthetic peptide"
DASNLET

SEQ ID NO: 830 - protein, 7 aa, synthetic construct
  REGION 1..7: note = source = /note="Description of Artificial Sequence: Synthetic peptide"
DASNLET

SEQ ID NO: 831 - protein, 7 aa, synthetic construct
  REGION 1..7: note = source = /note="Description of Artificial Sequence: Synthetic peptide"
DASNLET

SEQ ID NO: 832 - protein, 7 aa, synthetic construct
  REGION 1..7: note = source = /note="Description of Artificial Sequence: Synthetic peptide"
DASNLET

SEQ ID NO: 833 - protein, 7 aa, synthetic construct
  REGION 1..7: note = source = /note="Description of Artificial Sequence: Synthetic peptide"
DASNLET

SEQ ID NO: 834 - protein, 7 aa, synthetic construct
  REGION 1..7: note = source = /note="Description of Artificial Sequence: Synthetic peptide"
GASSLQS

SEQ ID NO: 835 - protein, 7 aa, synthetic construct
  REGION 1..7: note = source = /note="Description of Artificial Sequence: Synthetic peptide"
GASSLQS

SEQ ID NO: 836 - protein, 7 aa, synthetic construct
  REGION 1..7: note = source = /note="Description of Artificial Sequence: Synthetic peptide"
GASSLQS

SEQ ID NO: 837 - protein, 7 aa, synthetic construct
  REGION 1..7: note = source = /note="Description of Artificial Sequence: Synthetic peptide"
GASSLQS

SEQ ID NO: 838 - protein, 7 aa, synthetic construct
  REGION 1..7: note = source = /note="Description of Artificial Sequence: Synthetic peptide"
GASSLQS

SEQ ID NO: 839 - protein, 7 aa, synthetic construct
  REGION 1..7: note = source = /note="Description of Artificial Sequence: Synthetic peptide"
GASSLQS

SEQ ID NO: 840 - protein, 7 aa, synthetic construct
  REGION 1..7: note = source = /note="Description of Artificial Sequence: Synthetic peptide"
GASSLQS

SEQ ID NO: 841 - protein, 7 aa, synthetic construct
  REGION 1..7: note = source = /note="Description of Artificial Sequence: Synthetic peptide"
DASNLEP

SEQ ID NO: 842 - protein, 7 aa, synthetic construct
  REGION 1..7: note = source = /note="Description of Artificial Sequence: Synthetic peptide"
DASNLEP

SEQ ID NO: 843 - protein, 7 aa, synthetic construct
  REGION 1..7: note = source = /note="Description of Artificial Sequence: Synthetic peptide"
DASNLEP

SEQ ID NO: 844 - protein, 7 aa, synthetic construct
  REGION 1..7: note = source = /note="Description of Artificial Sequence: Synthetic peptide"
DASNLEP

SEQ ID NO: 845 - protein, 7 aa, synthetic construct
  REGION 1..7: note = source = /note="Description of Artificial Sequence: Synthetic peptide"
DASNLEP

SEQ ID NO: 846 - protein, 7 aa, synthetic construct
  REGION 1..7: note = source = /note="Description of Artificial Sequence: Synthetic peptide"
DASNLEP

SEQ ID NO: 847 - protein, 7 aa, synthetic construct
  REGION 1..7: note = source = /note="Description of Artificial Sequence: Synthetic peptide"
DASNLEP

SEQ ID NO: 848 - protein, 7 aa, synthetic construct
  REGION 1..7: note = source = /note="Description of Artificial Sequence: Synthetic peptide"
DASNLEP

SEQ ID NO: 849 - protein, 7 aa, synthetic construct
  REGION 1..7: note = source = /note="Description of Artificial Sequence: Synthetic peptide"
DASNLEP

SEQ ID NO: 850 - protein, 7 aa, synthetic construct
  REGION 1..7: note = source = /note="Description of Artificial Sequence: Synthetic peptide"
DASNLEP

SEQ ID NO: 851 - protein, 7 aa, synthetic construct
  REGION 1..7: note = source = /note="Description of Artificial Sequence: Synthetic peptide"
DASNLEP

SEQ ID NO: 852 - protein, 7 aa, synthetic construct
  REGION 1..7: note = source = /note="Description of Artificial Sequence: Synthetic peptide"
GASSRAT

SEQ ID NO: 853 - protein, 7 aa, synthetic construct
  REGION 1..7: note = source = /note="Description of Artificial Sequence: Synthetic peptide"
GASSRAT

SEQ ID NO: 854 - protein, 7 aa, synthetic construct
  REGION 1..7: note = source = /note="Description of Artificial Sequence: Synthetic peptide"
GASSRAT

SEQ ID NO: 855 - protein, 7 aa, synthetic construct
  REGION 1..7: note = source = /note="Description of Artificial Sequence: Synthetic peptide"
GASSRAT

SEQ ID NO: 856 - protein, 7 aa, synthetic construct
  REGION 1..7: note = source = /note="Description of Artificial Sequence: Synthetic peptide"
GAATRAT

SEQ ID NO: 857 - protein, 7 aa, synthetic construct
  REGION 1..7: note = source = /note="Description of Artificial Sequence: Synthetic peptide"
GAATRAT

SEQ ID NO: 858 - protein, 7 aa, synthetic construct
  REGION 1..7: note = source = /note="Description of Artificial Sequence: Synthetic peptide"
GAATRAT

SEQ ID NO: 859 - protein, 7 aa, synthetic construct
  REGION 1..7: note = source = /note="Description of Artificial Sequence: Synthetic peptide"
GAATRAT

SEQ ID NO: 860 - protein, 7 aa, synthetic construct
  REGION 1..7: note = source = /note="Description of Artificial Sequence: Synthetic peptide"
GAATRAT

SEQ ID NO: 861 - protein, 7 aa, synthetic construct
  REGION 1..7: note = source = /note="Description of Artificial Sequence: Synthetic peptide"
GAATRAT

SEQ ID NO: 862 - protein, 7 aa, synthetic construct
  REGION 1..7: note = source = /note="Description of Artificial Sequence: Synthetic peptide"
GAATRAT

SEQ ID NO: 863 - protein, 7 aa, synthetic construct
  REGION 1..7: note = source = /note="Description of Artificial Sequence: Synthetic peptide"
GAATRAT

SEQ ID NO: 864 - protein, 7 aa, synthetic construct
  REGION 1..7: note = source = /note="Description of Artificial Sequence: Synthetic peptide"
GASSRAT

SEQ ID NO: 865 - protein, 7 aa, synthetic construct
  REGION 1..7: note = source = /note="Description of Artificial Sequence: Synthetic peptide"
GASSRAT

SEQ ID NO: 866 - protein, 7 aa, synthetic construct
  REGION 1..7: note = source = /note="Description of Artificial Sequence: Synthetic peptide"
GASSRAT

SEQ ID NO: 867 - protein, 7 aa, synthetic construct
  REGION 1..7: note = source = /note="Description of Artificial Sequence: Synthetic peptide"
GASSRAT

SEQ ID NO: 868 - protein, 7 aa, synthetic construct
  REGION 1..7: note = source = /note="Description of Artificial Sequence: Synthetic peptide"
GASSRAT

SEQ ID NO: 869 - protein, 7 aa, synthetic construct
  REGION 1..7: note = source = /note="Description of Artificial Sequence: Synthetic peptide"
GASSRAT

SEQ ID NO: 870 - protein, 7 aa, synthetic construct
  REGION 1..7: note = source = /note="Description of Artificial Sequence: Synthetic peptide"
GASSRAT

SEQ ID NO: 871 - protein, 7 aa, synthetic construct
  REGION 1..7: note = source = /note="Description of Artificial Sequence: Synthetic peptide"
WASTRES

SEQ ID NO: 872 - protein, 7 aa, synthetic construct
  REGION 1..7: note = source = /note="Description of Artificial Sequence: Synthetic peptide"
WASTRES

SEQ ID NO: 873 - protein, 7 aa, synthetic construct
  REGION 1..7: note = source = /note="Description of Artificial Sequence: Synthetic peptide"
WASTRES

SEQ ID NO: 874 - protein, 7 aa, synthetic construct
  REGION 1..7: note = source = /note="Description of Artificial Sequence: Synthetic peptide"
WASTRES

SEQ ID NO: 875 - protein, 7 aa, synthetic construct
  REGION 1..7: note = source = /note="Description of Artificial Sequence: Synthetic peptide"
WASTRES

SEQ ID NO: 876 - protein, 7 aa, synthetic construct
  REGION 1..7: note = source = /note="Description of Artificial Sequence: Synthetic peptide"
WASTRES

SEQ ID NO: 877 - protein, 7 aa, synthetic construct
  REGION 1..7: note = source = /note="Description of Artificial Sequence: Synthetic peptide"
WASTRES

SEQ ID NO: 878 - protein, 7 aa, synthetic construct
  REGION 1..7: note = source = /note="Description of Artificial Sequence: Synthetic peptide"
WASTRES

SEQ ID NO: 879 - protein, 7 aa, synthetic construct
  REGION 1..7: note = source = /note="Description of Artificial Sequence: Synthetic peptide"
WASTRES

SEQ ID NO: 880 - protein, 7 aa, synthetic construct
  REGION 1..7: note = source = /note="Description of Artificial Sequence: Synthetic peptide"
WASTRES

SEQ ID NO: 881 - protein, 7 aa, synthetic construct
  REGION 1..7: note = source = /note="Description of Artificial Sequence: Synthetic peptide"
WASTRES

SEQ ID NO: 882 - protein, 7 aa, synthetic construct
  REGION 1..7: note = source = /note="Description of Artificial Sequence: Synthetic peptide"
WTSTRES

SEQ ID NO: 883 - protein, 7 aa, synthetic construct
  REGION 1..7: note = source = /note="Description of Artificial Sequence: Synthetic peptide"
WTSTRES

SEQ ID NO: 884 - protein, 7 aa, synthetic construct
  REGION 1..7: note = source = /note="Description of Artificial Sequence: Synthetic peptide"
WTSTRDS

SEQ ID NO: 885 - protein, 7 aa, synthetic construct
  REGION 1..7: note = source = /note="Description of Artificial Sequence: Synthetic peptide"
WTSTRES

SEQ ID NO: 886 - protein, 7 aa, synthetic construct
  REGION 1..7: note = source = /note="Description of Artificial Sequence: Synthetic peptide"
WTSTRES

SEQ ID NO: 887 - protein, 7 aa, synthetic construct
  REGION 1..7: note = source = /note="Description of Artificial Sequence: Synthetic peptide"
WTSTRDS

SEQ ID NO: 888 - protein, 7 aa, synthetic construct
  REGION 1..7: note = source = /note="Description of Artificial Sequence: Synthetic peptide"
WTSTRDS

SEQ ID NO: 889 - protein, 7 aa, synthetic construct
  REGION 1..7: note = source = /note="Description of Artificial Sequence: Synthetic peptide"
WTSTRES

SEQ ID NO: 890 - protein, 7 aa, synthetic construct
  REGION 1..7: note = source = /note="Description of Artificial Sequence: Synthetic peptide"
WTSTRES

SEQ ID NO: 891 - protein, 7 aa, synthetic construct
  REGION 1..7: note = source = /note="Description of Artificial Sequence: Synthetic peptide"
WASTRES

SEQ ID NO: 892 - protein, 7 aa, synthetic construct
  REGION 1..7: note = source = /note="Description of Artificial Sequence: Synthetic peptide"
WASTRES

SEQ ID NO: 893 - protein, 7 aa, synthetic construct
  REGION 1..7: note = source = /note="Description of Artificial Sequence: Synthetic peptide"
WASTRES

SEQ ID NO: 894 - protein, 7 aa, synthetic construct
  REGION 1..7: note = source = /note="Description of Artificial Sequence: Synthetic peptide"
WASTRES

SEQ ID NO: 895 - protein, 7 aa, synthetic construct
  REGION 1..7: note = source = /note="Description of Artificial Sequence: Synthetic peptide"
WASTRES

SEQ ID NO: 896 - protein, 7 aa, synthetic construct
  REGION 1..7: note = source = /note="Description of Artificial Sequence: Synthetic peptide"
WTSTRDS

SEQ ID NO: 897 - protein, 7 aa, synthetic construct
  REGION 1..7: note = source = /note="Description of Artificial Sequence: Synthetic peptide"
WTSTRDS

SEQ ID NO: 898 - protein, 7 aa, synthetic construct
  REGION 1..7: note = source = /note="Description of Artificial Sequence: Synthetic peptide"
WTSTRDS

SEQ ID NO: 899 - protein, 7 aa, synthetic construct
  REGION 1..7: note = source = /note="Description of Artificial Sequence: Synthetic peptide"
WTSTRDS

SEQ ID NO: 900 - protein, 7 aa, synthetic construct
  REGION 1..7: note = source = /note="Description of Artificial Sequence: Synthetic peptide"
WTSTRDS

SEQ ID NO: 901 - protein, 7 aa, synthetic construct
  REGION 1..7: note = source = /note="Description of Artificial Sequence: Synthetic peptide"
WTSTRDS

SEQ ID NO: 902 - protein, 7 aa, synthetic construct
  REGION 1..7: note = source = /note="Description of Artificial Sequence: Synthetic peptide"
WTSTRDS

SEQ ID NO: 903 - protein, 7 aa, synthetic construct
  REGION 1..7: note = source = /note="Description of Artificial Sequence: Synthetic peptide"
WTSTRES

SEQ ID NO: 904 - protein, 7 aa, synthetic construct
  REGION 1..7: note = source = /note="Description of Artificial Sequence: Synthetic peptide"
WTSTRES

SEQ ID NO: 905 - protein, 7 aa, synthetic construct
  REGION 1..7: note = source = /note="Description of Artificial Sequence: Synthetic peptide"
WTSTRES

SEQ ID NO: 906 - protein, 7 aa, synthetic construct
  REGION 1..7: note = source = /note="Description of Artificial Sequence: Synthetic peptide"
WTSTRES

SEQ ID NO: 907 - protein, 7 aa, synthetic construct
  REGION 1..7: note = source = /note="Description of Artificial Sequence: Synthetic peptide"
WTSTRDS

SEQ ID NO: 908 - protein, 7 aa, synthetic construct
  REGION 1..7: note = source = /note="Description of Artificial Sequence: Synthetic peptide"
WTSTRES

SEQ ID NO: 909 - protein, 7 aa, synthetic construct
  REGION 1..7: note = source = /note="Description of Artificial Sequence: Synthetic peptide"
TNNQRPS

SEQ ID NO: 910 - protein, 7 aa, synthetic construct
  REGION 1..7: note = source = /note="Description of Artificial Sequence: Synthetic peptide"
TNNQRPS

SEQ ID NO: 911 - protein, 7 aa, synthetic construct
  REGION 1..7: note = source = /note="Description of Artificial Sequence: Synthetic peptide"
TNNQRPS

SEQ ID NO: 912 - protein, 7 aa, synthetic construct
  REGION 1..7: note = source = /note="Description of Artificial Sequence: Synthetic peptide"
TNNQRPS

SEQ ID NO: 913 - protein, 7 aa, synthetic construct
  REGION 1..7: note = source = /note="Description of Artificial Sequence: Synthetic peptide"
TNNQRPS

SEQ ID NO: 914 - protein, 7 aa, synthetic construct
  REGION 1..7: note = source = /note="Description of Artificial Sequence: Synthetic peptide"
TNNQRPS

SEQ ID NO: 915 - protein, 7 aa, synthetic construct
  REGION 1..7: note = source = /note="Description of Artificial Sequence: Synthetic peptide"
TNNQRPS

SEQ ID NO: 916 - protein, 7 aa, synthetic construct
  REGION 1..7: note = source = /note="Description of Artificial Sequence: Synthetic peptide"
TNNQRPS

SEQ ID NO: 917 - protein, 7 aa, synthetic construct
  REGION 1..7: note = source = /note="Description of Artificial Sequence: Synthetic peptide"
TNNQRPS

SEQ ID NO: 918 - protein, 7 aa, synthetic construct
  REGION 1..7: note = source = /note="Description of Artificial Sequence: Synthetic peptide"
TNNQRPS

SEQ ID NO: 919 - protein, 7 aa, synthetic construct
  REGION 1..7: note = source = /note="Description of Artificial Sequence: Synthetic peptide"
TNNQRPS

SEQ ID NO: 920 - protein, 7 aa, synthetic construct
  REGION 1..7: note = source = /note="Description of Artificial Sequence: Synthetic peptide"
TNNQRPS

SEQ ID NO: 921 - protein, 7 aa, synthetic construct
  REGION 1..7: note = source = /note="Description of Artificial Sequence: Synthetic peptide"
TNNQRPS

SEQ ID NO: 922 - protein, 7 aa, synthetic construct
  REGION 1..7: note = source = /note="Description of Artificial Sequence: Synthetic peptide"
TNNQRPS

SEQ ID NO: 923 - protein, 7 aa, synthetic construct
  REGION 1..7: note = source = /note="Description of Artificial Sequence: Synthetic peptide"
GASSLQS

SEQ ID NO: 924 - protein, 7 aa, synthetic construct
  REGION 1..7: note = source = /note="Description of Artificial Sequence: Synthetic peptide"
GASSLQS

SEQ ID NO: 925 - protein, 7 aa, synthetic construct
  REGION 1..7: note = source = /note="Description of Artificial Sequence: Synthetic peptide"
TNNQRPS

SEQ ID NO: 926 - protein, 7 aa, synthetic construct
  REGION 1..7: note = source = /note="Description of Artificial Sequence: Synthetic peptide"
VASSLQS

SEQ ID NO: 927 - protein, 7 aa, synthetic construct
  REGION 1..7: note = source = /note="Description of Artificial Sequence: Synthetic peptide"
DNNKRPS

SEQ ID NO: 928 - protein, 7 aa, synthetic construct
  REGION 1..7: note = source = /note="Description of Artificial Sequence: Synthetic peptide"
VASSLQS

SEQ ID NO: 929 - protein, 7 aa, synthetic construct
  REGION 1..7: note = source = /note="Description of Artificial Sequence: Synthetic peptide"
VASSLQS

SEQ ID NO: 930 - protein, 7 aa, synthetic construct
  REGION 1..7: note = source = /note="Description of Artificial Sequence: Synthetic peptide"
VASSLQS

SEQ ID NO: 931 - protein, 7 aa, synthetic construct
  REGION 1..7: note = source = /note="Description of Artificial Sequence: Synthetic peptide"
VASSLQS

SEQ ID NO: 932 - protein, 7 aa, synthetic construct
  REGION 1..7: note = source = /note="Description of Artificial Sequence: Synthetic peptide"
VASSLQS

SEQ ID NO: 933 - protein, 7 aa, synthetic construct
  REGION 1..7: note = source = /note="Description of Artificial Sequence: Synthetic peptide"
VASSLQS

SEQ ID NO: 934 - protein, 7 aa, synthetic construct
  REGION 1..7: note = source = /note="Description of Artificial Sequence: Synthetic peptide"
DNNKRPS

SEQ ID NO: 935 - protein, 7 aa, synthetic construct
  REGION 1..7: note = source = /note="Description of Artificial Sequence: Synthetic peptide"
DNNKRPS

SEQ ID NO: 936 - protein, 7 aa, synthetic construct
  REGION 1..7: note = source = /note="Description of Artificial Sequence: Synthetic peptide"
DNNKRPS

SEQ ID NO: 937 - protein, 7 aa, synthetic construct
  REGION 1..7: note = source = /note="Description of Artificial Sequence: Synthetic peptide"
DNNKRPS

SEQ ID NO: 938 - protein, 7 aa, synthetic construct
  REGION 1..7: note = source = /note="Description of Artificial Sequence: Synthetic peptide"
DNNKRPS

SEQ ID NO: 939 - protein, 7 aa, synthetic construct
  REGION 1..7: note = source = /note="Description of Artificial Sequence: Synthetic peptide"
DNNKRPS

SEQ ID NO: 940 - protein, 7 aa, synthetic construct
  REGION 1..7: note = source = /note="Description of Artificial Sequence: Synthetic peptide"
DNNKRPS

SEQ ID NO: 941 - protein, 7 aa, synthetic construct
  REGION 1..7: note = source = /note="Description of Artificial Sequence: Synthetic peptide"
DNNKRPS

SEQ ID NO: 942 - protein, 7 aa, synthetic construct
  REGION 1..7: note = source = /note="Description of Artificial Sequence: Synthetic peptide"
VASSLQS

SEQ ID NO: 943 - protein, 11 aa, synthetic construct
  REGION 1..11: note = source = /note="Description of Artificial Sequence: Synthetic peptide"
ATFDDSLNGPV

SEQ ID NO: 944 - protein, 9 aa, synthetic construct
  REGION 1..9: note = source = /note="Description of Artificial Sequence: Synthetic peptide"
LQHNNYPFT

SEQ ID NO: 945 - protein, 9 aa, synthetic construct
  REGION 1..9: note = source = /note="Description of Artificial Sequence: Synthetic peptide"
LQHNNYPFT

SEQ ID NO: 946 - protein, 8 aa, synthetic construct
  REGION 1..8: note = source = /note="Description of Artificial Sequence: Synthetic peptide"
QQYDILLT

SEQ ID NO: 947 - protein, 9 aa, synthetic construct
  REGION 1..9: note = source = /note="Description of Artificial Sequence: Synthetic peptide"
QQYYSTPWT

SEQ ID NO: 948 - protein, 9 aa, synthetic construct
  REGION 1..9: note = source = /note="Description of Artificial Sequence: Synthetic peptide"
QQYYSTPWT

SEQ ID NO: 949 - protein, 9 aa, synthetic construct
  REGION 1..9: note = source = /note="Description of Artificial Sequence: Synthetic peptide"
QQYYRTPWT

SEQ ID NO: 950 - protein, 9 aa, synthetic construct
  REGION 1..9: note = source = /note="Description of Artificial Sequence: Synthetic peptide"
QQYYRTPWT

SEQ ID NO: 951 - protein, 9 aa, synthetic construct
  REGION 1..9: note = source = /note="Description of Artificial Sequence: Synthetic peptide"
QQYGSSPLT

SEQ ID NO: 952 - protein, 9 aa, synthetic construct
  REGION 1..9: note = source = /note="Description of Artificial Sequence: Synthetic peptide"
QQYNNWPLT

SEQ ID NO: 953 - protein, 9 aa, synthetic construct
  REGION 1..9: note = source = /note="Description of Artificial Sequence: Synthetic peptide"
LQHNSYPFT

SEQ ID NO: 954 - protein, 8 aa, synthetic construct
  REGION 1..8: note = source = /note="Description of Artificial Sequence: Synthetic peptide"
QQYDDLFT

SEQ ID NO: 955 - protein, 9 aa, synthetic construct
  REGION 1..9: note = source = /note="Description of Artificial Sequence: Synthetic peptide"
QQTNSFPPT

SEQ ID NO: 956 - protein, 9 aa, synthetic construct
  REGION 1..9: note = source = /note="Description of Artificial Sequence: Synthetic peptide"
QQTNSFPPT

SEQ ID NO: 957 - protein, 9 aa, synthetic construct
  REGION 1..9: note = source = /note="Description of Artificial Sequence: Synthetic peptide"
LQHNSYPFT

SEQ ID NO: 958 - protein, 9 aa, synthetic construct
  REGION 1..9: note = source = /note="Description of Artificial Sequence: Synthetic peptide"
LQHNSYPFT

SEQ ID NO: 959 - protein, 9 aa, synthetic construct
  REGION 1..9: note = source = /note="Description of Artificial Sequence: Synthetic peptide"
LQHNSYPFT

SEQ ID NO: 960 - protein, 9 aa, synthetic construct
  REGION 1..9: note = source = /note="Description of Artificial Sequence: Synthetic peptide"
LQHNSYPFT

SEQ ID NO: 961 - protein, 9 aa, synthetic construct
  REGION 1..9: note = source = /note="Description of Artificial Sequence: Synthetic peptide"
LQHNSYPFT

SEQ ID NO: 962 - protein, 9 aa, synthetic construct
  REGION 1..9: note = source = /note="Description of Artificial Sequence: Synthetic peptide"
LQHNSYPFT

SEQ ID NO: 963 - protein, 9 aa, synthetic construct
  REGION 1..9: note = source = /note="Description of Artificial Sequence: Synthetic peptide"
LQHNNYPFT

SEQ ID NO: 964 - protein, 9 aa, synthetic construct
  REGION 1..9: note = source = /note="Description of Artificial Sequence: Synthetic peptide"
LQHNNYPFT

SEQ ID NO: 965 - protein, 9 aa, synthetic construct
  REGION 1..9: note = source = /note="Description of Artificial Sequence: Synthetic peptide"
LQHNNYPFT

SEQ ID NO: 966 - protein, 9 aa, synthetic construct
  REGION 1..9: note = source = /note="Description of Artificial Sequence: Synthetic peptide"
LQHNNYPFT

SEQ ID NO: 967 - protein, 9 aa, synthetic construct
  REGION 1..9: note = source = /note="Description of Artificial Sequence: Synthetic peptide"
LQHNNYPFT

SEQ ID NO: 968 - protein, 9 aa, synthetic construct
  REGION 1..9: note = source = /note="Description of Artificial Sequence: Synthetic peptide"
LQHNNYPFT

SEQ ID NO: 969 - protein, 9 aa, synthetic construct
  REGION 1..9: note = source = /note="Description of Artificial Sequence: Synthetic peptide"
LQHNNYPFT

SEQ ID NO: 970 - protein, 9 aa, synthetic construct
  REGION 1..9: note = source = /note="Description of Artificial Sequence: Synthetic peptide"
LQHNNYPFT

SEQ ID NO: 971 - protein, 9 aa, synthetic construct
  REGION 1..9: note = source = /note="Description of Artificial Sequence: Synthetic peptide"
LQHNNYPFT

SEQ ID NO: 972 - protein, 9 aa, synthetic construct
  REGION 1..9: note = source = /note="Description of Artificial Sequence: Synthetic peptide"
LQHNNYPFT

SEQ ID NO: 973 - protein, 9 aa, synthetic construct
  REGION 1..9: note = source = /note="Description of Artificial Sequence: Synthetic peptide"
LQHNNYPFT

SEQ ID NO: 974 - protein, 9 aa, synthetic construct
  REGION 1..9: note = source = /note="Description of Artificial Sequence: Synthetic peptide"
LQHNNYPFT

SEQ ID NO: 975 - protein, 9 aa, synthetic construct
  REGION 1..9: note = source = /note="Description of Artificial Sequence: Synthetic peptide"
LQHNNYPFT

SEQ ID NO: 976 - protein, 9 aa, synthetic construct
  REGION 1..9: note = source = /note="Description of Artificial Sequence: Synthetic peptide"
LQHNNYPFT

SEQ ID NO: 977 - protein, 9 aa, synthetic construct
  REGION 1..9: note = source = /note="Description of Artificial Sequence: Synthetic peptide"
LQHNNYPFT

SEQ ID NO: 978 - protein, 9 aa, synthetic construct
  REGION 1..9: note = source = /note="Description of Artificial Sequence: Synthetic peptide"
LQHNNYPFT

SEQ ID NO: 979 - protein, 9 aa, synthetic construct
  REGION 1..9: note = source = /note="Description of Artificial Sequence: Synthetic peptide"
LQHNNYPFT

SEQ ID NO: 980 - protein, 9 aa, synthetic construct
  REGION 1..9: note = source = /note="Description of Artificial Sequence: Synthetic peptide"
LQHNNYPFT

SEQ ID NO: 981 - protein, 9 aa, synthetic construct
  REGION 1..9: note = source = /note="Description of Artificial Sequence: Synthetic peptide"
LQHNNYPFT

SEQ ID NO: 982 - protein, 8 aa, synthetic construct
  REGION 1..8: note = source = /note="Description of Artificial Sequence: Synthetic peptide"
QQYDILLT

SEQ ID NO: 983 - protein, 8 aa, synthetic construct
  REGION 1..8: note = source = /note="Description of Artificial Sequence: Synthetic peptide"
QQYDILLT

SEQ ID NO: 984 - protein, 8 aa, synthetic construct
  REGION 1..8: note = source = /note="Description of Artificial Sequence: Synthetic peptide"
QQYDILLT

SEQ ID NO: 985 - protein, 8 aa, synthetic construct
  REGION 1..8: note = source = /note="Description of Artificial Sequence: Synthetic peptide"
QQYDILLT

SEQ ID NO: 986 - protein, 8 aa, synthetic construct
  REGION 1..8: note = source = /note="Description of Artificial Sequence: Synthetic peptide"
QQYDILLT

SEQ ID NO: 987 - protein, 8 aa, synthetic construct
  REGION 1..8: note = source = /note="Description of Artificial Sequence: Synthetic peptide"
QQYDILLT

SEQ ID NO: 988 - protein, 8 aa, synthetic construct
  REGION 1..8: note = source = /note="Description of Artificial Sequence: Synthetic peptide"
QQYDILLT

SEQ ID NO: 989 - protein, 8 aa, synthetic construct
  REGION 1..8: note = source = /note="Description of Artificial Sequence: Synthetic peptide"
QQYDILLT

SEQ ID NO: 990 - protein, 8 aa, synthetic construct
  REGION 1..8: note = source = /note="Description of Artificial Sequence: Synthetic peptide"
QQYDILLT

SEQ ID NO: 991 - protein, 9 aa, synthetic construct
  REGION 1..9: note = source = /note="Description of Artificial Sequence: Synthetic peptide"
LQHNNYPFT

SEQ ID NO: 992 - protein, 9 aa, synthetic construct
  REGION 1..9: note = source = /note="Description of Artificial Sequence: Synthetic peptide"
LQHNNYPFT

SEQ ID NO: 993 - protein, 9 aa, synthetic construct
  REGION 1..9: note = source = /note="Description of Artificial Sequence: Synthetic peptide"
LQHNNYPFT

SEQ ID NO: 994 - protein, 9 aa, synthetic construct
  REGION 1..9: note = source = /note="Description of Artificial Sequence: Synthetic peptide"
LQHNNYPFT

SEQ ID NO: 995 - protein, 9 aa, synthetic construct
  REGION 1..9: note = source = /note="Description of Artificial Sequence: Synthetic peptide"
LQHNNYPFT

SEQ ID NO: 996 - protein, 9 aa, synthetic construct
  REGION 1..9: note = source = /note="Description of Artificial Sequence: Synthetic peptide"
LQHNNYPFT

SEQ ID NO: 997 - protein, 9 aa, synthetic construct
  REGION 1..9: note = source = /note="Description of Artificial Sequence: Synthetic peptide"
LQHNNYPFT

SEQ ID NO: 998 - protein, 8 aa, synthetic construct
  REGION 1..8: note = source = /note="Description of Artificial Sequence: Synthetic peptide"
QQYDDLFT

SEQ ID NO: 999 - protein, 8 aa, synthetic construct
  REGION 1..8: note = source = /note="Description of Artificial Sequence: Synthetic peptide"
QQYDDLFT

SEQ ID NO: 1000 - protein, 8 aa, synthetic construct
  REGION 1..8: note = source = /note="Description of Artificial Sequence: Synthetic peptide"
QQYDDLFT

SEQ ID NO: 1001 - protein, 8 aa, synthetic construct
  REGION 1..8: note = source = /note="Description of Artificial Sequence: Synthetic peptide"
QQYDDLFT

SEQ ID NO: 1002 - protein, 8 aa, synthetic construct
  REGION 1..8: note = source = /note="Description of Artificial Sequence: Synthetic peptide"
QQYDDLFT

SEQ ID NO: 1003 - protein, 8 aa, synthetic construct
  REGION 1..8: note = source = /note="Description of Artificial Sequence: Synthetic peptide"
QQYDDLFT

SEQ ID NO: 1004 - protein, 8 aa, synthetic construct
  REGION 1..8: note = source = /note="Description of Artificial Sequence: Synthetic peptide"
QQYDDLFT

SEQ ID NO: 1005 - protein, 8 aa, synthetic construct
  REGION 1..8: note = source = /note="Description of Artificial Sequence: Synthetic peptide"
QQYDDLFT

SEQ ID NO: 1006 - protein, 8 aa, synthetic construct
  REGION 1..8: note = source = /note="Description of Artificial Sequence: Synthetic peptide"
QQYDDLFT

SEQ ID NO: 1007 - protein, 8 aa, synthetic construct
  REGION 1..8: note = source = /note="Description of Artificial Sequence: Synthetic peptide"
QQYDDLFT

SEQ ID NO: 1008 - protein, 8 aa, synthetic construct
  REGION 1..8: note = source = /note="Description of Artificial Sequence: Synthetic peptide"
QQYDDLFT

SEQ ID NO: 1009 - protein, 8 aa, synthetic construct
  REGION 1..8: note = source = /note="Description of Artificial Sequence: Synthetic peptide"
QQYGSSPR

SEQ ID NO: 1010 - protein, 8 aa, synthetic construct
  REGION 1..8: note = source = /note="Description of Artificial Sequence: Synthetic peptide"
QQYGSSPR

SEQ ID NO: 1011 - protein, 8 aa, synthetic construct
  REGION 1..8: note = source = /note="Description of Artificial Sequence: Synthetic peptide"
QQYGSSPR

SEQ ID NO: 1012 - protein, 8 aa, synthetic construct
  REGION 1..8: note = source = /note="Description of Artificial Sequence: Synthetic peptide"
QQYGSSPR

SEQ ID NO: 1013 - protein, 9 aa, synthetic construct
  REGION 1..9: note = source = /note="Description of Artificial Sequence: Synthetic peptide"
QQYNNWPLT

SEQ ID NO: 1014 - protein, 9 aa, synthetic construct
  REGION 1..9: note = source = /note="Description of Artificial Sequence: Synthetic peptide"
QQYNNWPLT

SEQ ID NO: 1015 - protein, 9 aa, synthetic construct
  REGION 1..9: note = source = /note="Description of Artificial Sequence: Synthetic peptide"
QQYNNWPLT

SEQ ID NO: 1016 - protein, 9 aa, synthetic construct
  REGION 1..9: note = source = /note="Description of Artificial Sequence: Synthetic peptide"
QQYNNWPLT

SEQ ID NO: 1017 - protein, 9 aa, synthetic construct
  REGION 1..9: note = source = /note="Description of Artificial Sequence: Synthetic peptide"
QQYNNFPLT

SEQ ID NO: 1018 - protein, 9 aa, synthetic construct
  REGION 1..9: note = source = /note="Description of Artificial Sequence: Synthetic peptide"
QQYNNYPLT

SEQ ID NO: 1019 - protein, 9 aa, synthetic construct
  REGION 1..9: note = source = /note="Description of Artificial Sequence: Synthetic peptide"
QQYNNWPLT

SEQ ID NO: 1020 - protein, 9 aa, synthetic construct
  REGION 1..9: note = source = /note="Description of Artificial Sequence: Synthetic peptide"
QQYNNWPLT

SEQ ID NO: 1021 - protein, 9 aa, synthetic construct
  REGION 1..9: note = source = /note="Description of Artificial Sequence: Synthetic peptide"
QQYGSSPLT

SEQ ID NO: 1022 - protein, 9 aa, synthetic construct
  REGION 1..9: note = source = /note="Description of Artificial Sequence: Synthetic peptide"
QQYGSSPLT

SEQ ID NO: 1023 - protein, 9 aa, synthetic construct
  REGION 1..9: note = source = /note="Description of Artificial Sequence: Synthetic peptide"
QQYGSSPLT

SEQ ID NO: 1024 - protein, 9 aa, synthetic construct
  REGION 1..9: note = source = /note="Description of Artificial Sequence: Synthetic peptide"
QQYGSSPLT

SEQ ID NO: 1025 - protein, 9 aa, synthetic construct
  REGION 1..9: note = source = /note="Description of Artificial Sequence: Synthetic peptide"
QQYGSSPLT

SEQ ID NO: 1026 - protein, 9 aa, synthetic construct
  REGION 1..9: note = source = /note="Description of Artificial Sequence: Synthetic peptide"
QQYGSSPLT

SEQ ID NO: 1027 - protein, 9 aa, synthetic construct
  REGION 1..9: note = source = /note="Description of Artificial Sequence: Synthetic peptide"
QQYGSSPLT

SEQ ID NO: 1028 - protein, 9 aa, synthetic construct
  REGION 1..9: note = source = /note="Description of Artificial Sequence: Synthetic peptide"
QQYYSTPWT

SEQ ID NO: 1029 - protein, 9 aa, synthetic construct
  REGION 1..9: note = source = /note="Description of Artificial Sequence: Synthetic peptide"
QQYYSTPWT

SEQ ID NO: 1030 - protein, 9 aa, synthetic construct
  REGION 1..9: note = source = /note="Description of Artificial Sequence: Synthetic peptide"
QQYYSTPWT

SEQ ID NO: 1031 - protein, 9 aa, synthetic construct
  REGION 1..9: note = source = /note="Description of Artificial Sequence: Synthetic peptide"
QQYYSTPWT

SEQ ID NO: 1032 - protein, 9 aa, synthetic construct
  REGION 1..9: note = source = /note="Description of Artificial Sequence: Synthetic peptide"
QQYYSTPWT

SEQ ID NO: 1033 - protein, 9 aa, synthetic construct
  REGION 1..9: note = source = /note="Description of Artificial Sequence: Synthetic peptide"
QQYYSTPWT

SEQ ID NO: 1034 - protein, 9 aa, synthetic construct
  REGION 1..9: note = source = /note="Description of Artificial Sequence: Synthetic peptide"
QQYYSTPWT

SEQ ID NO: 1035 - protein, 9 aa, synthetic construct
  REGION 1..9: note = source = /note="Description of Artificial Sequence: Synthetic peptide"
QQYYSTPWT

SEQ ID NO: 1036 - protein, 9 aa, synthetic construct
  REGION 1..9: note = source = /note="Description of Artificial Sequence: Synthetic peptide"
QQYYSTPWT

SEQ ID NO: 1037 - protein, 9 aa, synthetic construct
  REGION 1..9: note = source = /note="Description of Artificial Sequence: Synthetic peptide"
QQYYSTPWT

SEQ ID NO: 1038 - protein, 9 aa, synthetic construct
  REGION 1..9: note = source = /note="Description of Artificial Sequence: Synthetic peptide"
QQYYSTPWT

SEQ ID NO: 1039 - protein, 9 aa, synthetic construct
  REGION 1..9: note = source = /note="Description of Artificial Sequence: Synthetic peptide"
QQYYRTPWT

SEQ ID NO: 1040 - protein, 9 aa, synthetic construct
  REGION 1..9: note = source = /note="Description of Artificial Sequence: Synthetic peptide"
QQYYRTPWT

SEQ ID NO: 1041 - protein, 9 aa, synthetic construct
  REGION 1..9: note = source = /note="Description of Artificial Sequence: Synthetic peptide"
QQYYRTPWT

SEQ ID NO: 1042 - protein, 9 aa, synthetic construct
  REGION 1..9: note = source = /note="Description of Artificial Sequence: Synthetic peptide"
QQYYRTPWT

SEQ ID NO: 1043 - protein, 9 aa, synthetic construct
  REGION 1..9: note = source = /note="Description of Artificial Sequence: Synthetic peptide"
QQYYRTPWT

SEQ ID NO: 1044 - protein, 9 aa, synthetic construct
  REGION 1..9: note = source = /note="Description of Artificial Sequence: Synthetic peptide"
QQYYRTPWT

SEQ ID NO: 1045 - protein, 9 aa, synthetic construct
  REGION 1..9: note = source = /note="Description of Artificial Sequence: Synthetic peptide"
QQYYRTPWT

SEQ ID NO: 1046 - protein, 9 aa, synthetic construct
  REGION 1..9: note = source = /note="Description of Artificial Sequence: Synthetic peptide"
QQYYRTPWT

SEQ ID NO: 1047 - protein, 9 aa, synthetic construct
  REGION 1..9: note = source = /note="Description of Artificial Sequence: Synthetic peptide"
QQYYRTPWT

SEQ ID NO: 1048 - protein, 9 aa, synthetic construct
  REGION 1..9: note = source = /note="Description of Artificial Sequence: Synthetic peptide"
QQYYSTPWT

SEQ ID NO: 1049 - protein, 9 aa, synthetic construct
  REGION 1..9: note = source = /note="Description of Artificial Sequence: Synthetic peptide"
QQYYSTPWT

SEQ ID NO: 1050 - protein, 9 aa, synthetic construct
  REGION 1..9: note = source = /note="Description of Artificial Sequence: Synthetic peptide"
QQYYSTPWT

SEQ ID NO: 1051 - protein, 9 aa, synthetic construct
  REGION 1..9: note = source = /note="Description of Artificial Sequence: Synthetic peptide"
QQYYSTPWT

SEQ ID NO: 1052 - protein, 9 aa, synthetic construct
  REGION 1..9: note = source = /note="Description of Artificial Sequence: Synthetic peptide"
QQYYSTPWT

SEQ ID NO: 1053 - protein, 9 aa, synthetic construct
  REGION 1..9: note = source = /note="Description of Artificial Sequence: Synthetic peptide"
QQYYRTPWT

SEQ ID NO: 1054 - protein, 9 aa, synthetic construct
  REGION 1..9: note = source = /note="Description of Artificial Sequence: Synthetic peptide"
QQYYRTPWT

SEQ ID NO: 1055 - protein, 9 aa, synthetic construct
  REGION 1..9: note = source = /note="Description of Artificial Sequence: Synthetic peptide"
QQYYRTPWT

SEQ ID NO: 1056 - protein, 9 aa, synthetic construct
  REGION 1..9: note = source = /note="Description of Artificial Sequence: Synthetic peptide"
QQYYRTPWT

SEQ ID NO: 1057 - protein, 9 aa, synthetic construct
  REGION 1..9: note = source = /note="Description of Artificial Sequence: Synthetic peptide"
QQYYRTPWT

SEQ ID NO: 1058 - protein, 9 aa, synthetic construct
  REGION 1..9: note = source = /note="Description of Artificial Sequence: Synthetic peptide"
QQYYRTPWT

SEQ ID NO: 1059 - protein, 9 aa, synthetic construct
  REGION 1..9: note = source = /note="Description of Artificial Sequence: Synthetic peptide"
QQYYRTPWT

SEQ ID NO: 1060 - protein, 9 aa, synthetic construct
  REGION 1..9: note = source = /note="Description of Artificial Sequence: Synthetic peptide"
QQYYRTPWT

SEQ ID NO: 1061 - protein, 9 aa, synthetic construct
  REGION 1..9: note = source = /note="Description of Artificial Sequence: Synthetic peptide"
QQYYRTPWT

SEQ ID NO: 1062 - protein, 9 aa, synthetic construct
  REGION 1..9: note = source = /note="Description of Artificial Sequence: Synthetic peptide"
QQYYRTPWT

SEQ ID NO: 1063 - protein, 9 aa, synthetic construct
  REGION 1..9: note = source = /note="Description of Artificial Sequence: Synthetic peptide"
QQYYRTPWT

SEQ ID NO: 1064 - protein, 9 aa, synthetic construct
  REGION 1..9: note = source = /note="Description of Artificial Sequence: Synthetic peptide"
QQYYRTPWT

SEQ ID NO: 1065 - protein, 9 aa, synthetic construct
  REGION 1..9: note = source = /note="Description of Artificial Sequence: Synthetic peptide"
QQYYRTPWT

SEQ ID NO: 1066 - protein, 11 aa, synthetic construct
  REGION 1..11: note = source = /note="Description of Artificial Sequence: Synthetic peptide"
ATFDESLSGPV

SEQ ID NO: 1067 - protein, 11 aa, synthetic construct
  REGION 1..11: note = source = /note="Description of Artificial Sequence: Synthetic peptide"
ATFDESLQGPV

SEQ ID NO: 1068 - protein, 11 aa, synthetic construct
  REGION 1..11: note = source = /note="Description of Artificial Sequence: Synthetic peptide"
ATFDESLSGPV

SEQ ID NO: 1069 - protein, 11 aa, synthetic construct
  REGION 1..11: note = source = /note="Description of Artificial Sequence: Synthetic peptide"
ATFDESLQGPV

SEQ ID NO: 1070 - protein, 11 aa, synthetic construct
  REGION 1..11: note = source = /note="Description of Artificial Sequence: Synthetic peptide"
ATFDDSLNGPV

SEQ ID NO: 1071 - protein, 11 aa, synthetic construct
  REGION 1..11: note = source = /note="Description of Artificial Sequence: Synthetic peptide"
ATFDDSLNGPV

SEQ ID NO: 1072 - protein, 11 aa, synthetic construct
  REGION 1..11: note = source = /note="Description of Artificial Sequence: Synthetic peptide"
ATFDESLNGPV

SEQ ID NO: 1073 - protein, 11 aa, synthetic construct
  REGION 1..11: note = source = /note="Description of Artificial Sequence: Synthetic peptide"
ATFDDSLQGPV

SEQ ID NO: 1074 - protein, 11 aa, synthetic construct
  REGION 1..11: note = source = /note="Description of Artificial Sequence: Synthetic peptide"
ATFDDSLSGPV

SEQ ID NO: 1075 - protein, 11 aa, synthetic construct
  REGION 1..11: note = source = /note="Description of Artificial Sequence: Synthetic peptide"
ATFDDSLNAPV

SEQ ID NO: 1076 - protein, 11 aa, synthetic construct
  REGION 1..11: note = source = /note="Description of Artificial Sequence: Synthetic peptide"
ATFDSSLNGPV

SEQ ID NO: 1077 - protein, 11 aa, synthetic construct
  REGION 1..11: note = source = /note="Description of Artificial Sequence: Synthetic peptide"
ATFDSSLNAPV

SEQ ID NO: 1078 - protein, 11 aa, synthetic construct
  REGION 1..11: note = source = /note="Description of Artificial Sequence: Synthetic peptide"
ATFDSSLNAPV

SEQ ID NO: 1079 - protein, 11 aa, synthetic construct
  REGION 1..11: note = source = /note="Description of Artificial Sequence: Synthetic peptide"
ATFDESLSGPV

SEQ ID NO: 1080 - protein, 9 aa, synthetic construct
  REGION 1..9: note = source = /note="Description of Artificial Sequence: Synthetic peptide"
LQHNNYPFT

SEQ ID NO: 1081 - protein, 9 aa, synthetic construct
  REGION 1..9: note = source = /note="Description of Artificial Sequence: Synthetic peptide"
LQHNNYPFT

SEQ ID NO: 1082 - protein, 11 aa, synthetic construct
  REGION 1..11: note = source = /note="Description of Artificial Sequence: Synthetic peptide"
ATFDSSLSGPV

SEQ ID NO: 1083 - protein, 9 aa, synthetic construct
  REGION 1..9: note = source = /note="Description of Artificial Sequence: Synthetic peptide"
QQSYSTLIS

SEQ ID NO: 1084 - protein, 11 aa, synthetic construct
  REGION 1..11: note = source = /note="Description of Artificial Sequence: Synthetic peptide"
GTWDSSLSAVV

SEQ ID NO: 1085 - protein, 9 aa, synthetic construct
  REGION 1..9: note = source = /note="Description of Artificial Sequence: Synthetic peptide"
QQSYSTLIS

SEQ ID NO: 1086 - protein, 9 aa, synthetic construct
  REGION 1..9: note = source = /note="Description of Artificial Sequence: Synthetic peptide"
QQSYSTLIS

SEQ ID NO: 1087 - protein, 9 aa, synthetic construct
  REGION 1..9: note = source = /note="Description of Artificial Sequence: Synthetic peptide"
QQSYSTLIS

SEQ ID NO: 1088 - protein, 9 aa, synthetic construct
  REGION 1..9: note = source = /note="Description of Artificial Sequence: Synthetic peptide"
QQSYSTLIS

SEQ ID NO: 1089 - protein, 9 aa, synthetic construct
  REGION 1..9: note = source = /note="Description of Artificial Sequence: Synthetic peptide"
QQSYSTLIS

SEQ ID NO: 1090 - protein, 9 aa, synthetic construct
  REGION 1..9: note = source = /note="Description of Artificial Sequence: Synthetic peptide"
QQSYSTLIS

SEQ ID NO: 1091 - protein, 11 aa, synthetic construct
  REGION 1..11: note = source = /note="Description of Artificial Sequence: Synthetic peptide"
GTWDSSLSAVV

SEQ ID NO: 1092 - protein, 11 aa, synthetic construct
  REGION 1..11: note = source = /note="Description of Artificial Sequence: Synthetic peptide"
GTWDSSLSAVV

SEQ ID NO: 1093 - protein, 11 aa, synthetic construct
  REGION 1..11: note = source = /note="Description of Artificial Sequence: Synthetic peptide"
GTWDSSLSAVV

SEQ ID NO: 1094 - protein, 11 aa, synthetic construct
  REGION 1..11: note = source = /note="Description of Artificial Sequence: Synthetic peptide"
GTFESSLSAVV

SEQ ID NO: 1095 - protein, 11 aa, synthetic construct
  REGION 1..11: note = source = /note="Description of Artificial Sequence: Synthetic peptide"
GTWDSSLSAVV

SEQ ID NO: 1096 - protein, 11 aa, synthetic construct
  REGION 1..11: note = source = /note="Description of Artificial Sequence: Synthetic peptide"
GTWDSSLSAVV

SEQ ID NO: 1097 - protein, 11 aa, synthetic construct
  REGION 1..11: note = source = /note="Description of Artificial Sequence: Synthetic peptide"
GTWDSSLSAVV

SEQ ID NO: 1098 - protein, 11 aa, synthetic construct
  REGION 1..11: note = source = /note="Description of Artificial Sequence: Synthetic peptide"
GTFESSLSAVV

SEQ ID NO: 1099 - protein, 9 aa, synthetic construct
  REGION 1..9: note = source = /note="Description of Artificial Sequence: Synthetic peptide"
QQSYSTLLS

SEQ ID NO: 1100 - protein, 5 aa, synthetic construct
  REGION 1..5: note = source = /note="Description of Artificial Sequence: Synthetic peptide"
GYYMH

SEQ ID NO: 1101 - protein, 5 aa, synthetic construct
  REGION 1..5: note = source = /note="Description of Artificial Sequence: Synthetic peptide"
NFGMH

SEQ ID NO: 1102 - protein, 5 aa, synthetic construct
  REGION 1..5: note = source = /note="Description of Artificial Sequence: Synthetic peptide"
YFGMH

SEQ ID NO: 1103 - protein, 5 aa, synthetic construct
  REGION 1..5: note = source = /note="Description of Artificial Sequence: Synthetic peptide"
SYGMH

SEQ ID NO: 1104 - protein, 5 aa, synthetic construct
  REGION 1..5: note = source = /note="Description of Artificial Sequence: Synthetic peptide"
GYYIH

SEQ ID NO: 1105 - protein, 5 aa, synthetic construct
  REGION 1..5: note = source = /note="Description of Artificial Sequence: Synthetic peptide"
GYYIH

SEQ ID NO: 1106 - protein, 5 aa, synthetic construct
  REGION 1..5: note = source = /note="Description of Artificial Sequence: Synthetic peptide"
GYYIH

SEQ ID NO: 1107 - protein, 5 aa, synthetic construct
  REGION 1..5: note = source = /note="Description of Artificial Sequence: Synthetic peptide"
GYYIH

SEQ ID NO: 1108 - protein, 7 aa, synthetic construct
  REGION 1..7: note = source = /note="Description of Artificial Sequence: Synthetic peptide"
SGGYYWS

SEQ ID NO: 1109 - protein, 5 aa, synthetic construct
  REGION 1..5: note = source = /note="Description of Artificial Sequence: Synthetic peptide"
NYGMH

SEQ ID NO: 1110 - protein, 5 aa, synthetic construct
  REGION 1..5: note = source = /note="Description of Artificial Sequence: Synthetic peptide"
YFGMH

SEQ ID NO: 1111 - protein, 5 aa, synthetic construct
  REGION 1..5: note = source = /note="Description of Artificial Sequence: Synthetic peptide"
SYGMH

SEQ ID NO: 1112 - protein, 5 aa, synthetic construct
  REGION 1..5: note = source = /note="Description of Artificial Sequence: Synthetic peptide"
SYYWS

SEQ ID NO: 1113 - protein, 5 aa, synthetic construct
  REGION 1..5: note = source = /note="Description of Artificial Sequence: Synthetic peptide"
SYYWS

SEQ ID NO: 1114 - protein, 5 aa, synthetic construct
  REGION 1..5: note = source = /note="Description of Artificial Sequence: Synthetic peptide"
YFGMH

SEQ ID NO: 1115 - protein, 5 aa, synthetic construct
  REGION 1..5: note = source = /note="Description of Artificial Sequence: Synthetic peptide"
YFGMH

SEQ ID NO: 1116 - protein, 5 aa, synthetic construct
  REGION 1..5: note = source = /note="Description of Artificial Sequence: Synthetic peptide"
YFGMH

SEQ ID NO: 1117 - protein, 5 aa, synthetic construct
  REGION 1..5: note = source = /note="Description of Artificial Sequence: Synthetic peptide"
YFGMH

SEQ ID NO: 1118 - protein, 5 aa, synthetic construct
  REGION 1..5: note = source = /note="Description of Artificial Sequence: Synthetic peptide"
YFGMH

SEQ ID NO: 1119 - protein, 5 aa, synthetic construct
  REGION 1..5: note = source = /note="Description of Artificial Sequence: Synthetic peptide"
YFGMH

SEQ ID NO: 1120 - protein, 5 aa, synthetic construct
  REGION 1..5: note = source = /note="Description of Artificial Sequence: Synthetic peptide"
NFGMH

SEQ ID NO: 1121 - protein, 5 aa, synthetic construct
  REGION 1..5: note = source = /note="Description of Artificial Sequence: Synthetic peptide"
NFGMH

SEQ ID NO: 1122 - protein, 5 aa, synthetic construct
  REGION 1..5: note = source = /note="Description of Artificial Sequence: Synthetic peptide"
NFGMH

SEQ ID NO: 1123 - protein, 5 aa, synthetic construct
  REGION 1..5: note = source = /note="Description of Artificial Sequence: Synthetic peptide"
NFGMH

SEQ ID NO: 1124 - protein, 5 aa, synthetic construct
  REGION 1..5: note = source = /note="Description of Artificial Sequence: Synthetic peptide"
NFGMH

SEQ ID NO: 1125 - protein, 5 aa, synthetic construct
  REGION 1..5: note = source = /note="Description of Artificial Sequence: Synthetic peptide"
NFGMH

SEQ ID NO: 1126 - protein, 5 aa, synthetic construct
  REGION 1..5: note = source = /note="Description of Artificial Sequence: Synthetic peptide"
NFGMH

SEQ ID NO: 1127 - protein, 5 aa, synthetic construct
  REGION 1..5: note = source = /note="Description of Artificial Sequence: Synthetic peptide"
NFGMH

SEQ ID NO: 1128 - protein, 5 aa, synthetic construct
  REGION 1..5: note = source = /note="Description of Artificial Sequence: Synthetic peptide"
NFGMH

SEQ ID NO: 1129 - protein, 5 aa, synthetic construct
  REGION 1..5: note = source = /note="Description of Artificial Sequence: Synthetic peptide"
NFGMH

SEQ ID NO: 1130 - protein, 5 aa, synthetic construct
  REGION 1..5: note = source = /note="Description of Artificial Sequence: Synthetic peptide"
NFGMH

SEQ ID NO: 1131 - protein, 5 aa, synthetic construct
  REGION 1..5: note = source = /note="Description of Artificial Sequence: Synthetic peptide"
NFGMH

SEQ ID NO: 1132 - protein, 5 aa, synthetic construct
  REGION 1..5: note = source = /note="Description of Artificial Sequence: Synthetic peptide"
NFGMH

SEQ ID NO: 1133 - protein, 5 aa, synthetic construct
  REGION 1..5: note = source = /note="Description of Artificial Sequence: Synthetic peptide"
NFGMH

SEQ ID NO: 1134 - protein, 5 aa, synthetic construct
  REGION 1..5: note = source = /note="Description of Artificial Sequence: Synthetic peptide"
NFGMH

SEQ ID NO: 1135 - protein, 5 aa, synthetic construct
  REGION 1..5: note = source = /note="Description of Artificial Sequence: Synthetic peptide"
NFGMH

SEQ ID NO: 1136 - protein, 5 aa, synthetic construct
  REGION 1..5: note = source = /note="Description of Artificial Sequence: Synthetic peptide"
NFGMH

SEQ ID NO: 1137 - protein, 5 aa, synthetic construct
  REGION 1..5: note = source = /note="Description of Artificial Sequence: Synthetic peptide"
NFGMH

SEQ ID NO: 1138 - protein, 5 aa, synthetic construct
  REGION 1..5: note = source = /note="Description of Artificial Sequence: Synthetic peptide"
NFGMH

SEQ ID NO: 1139 - protein, 5 aa, synthetic construct
  REGION 1..5: note = source = /note="Description of Artificial Sequence: Synthetic peptide"
SYGMH

SEQ ID NO: 1140 - protein, 5 aa, synthetic construct
  REGION 1..5: note = source = /note="Description of Artificial Sequence: Synthetic peptide"
SYGMH

SEQ ID NO: 1141 - protein, 5 aa, synthetic construct
  REGION 1..5: note = source = /note="Description of Artificial Sequence: Synthetic peptide"
SYGMH

SEQ ID NO: 1142 - protein, 5 aa, synthetic construct
  REGION 1..5: note = source = /note="Description of Artificial Sequence: Synthetic peptide"
SYGMH

SEQ ID NO: 1143 - protein, 5 aa, synthetic construct
  REGION 1..5: note = source = /note="Description of Artificial Sequence: Synthetic peptide"
SYGMH

SEQ ID NO: 1144 - protein, 5 aa, synthetic construct
  REGION 1..5: note = source = /note="Description of Artificial Sequence: Synthetic peptide"
SYGMH

SEQ ID NO: 1145 - protein, 5 aa, synthetic construct
  REGION 1..5: note = source = /note="Description of Artificial Sequence: Synthetic peptide"
SYGMH

SEQ ID NO: 1146 - protein, 5 aa, synthetic construct
  REGION 1..5: note = source = /note="Description of Artificial Sequence: Synthetic peptide"
SYGMH

SEQ ID NO: 1147 - protein, 5 aa, synthetic construct
  REGION 1..5: note = source = /note="Description of Artificial Sequence: Synthetic peptide"
SYGMH

SEQ ID NO: 1148 - protein, 5 aa, synthetic construct
  REGION 1..5: note = source = /note="Description of Artificial Sequence: Synthetic peptide"
YFGMH

SEQ ID NO: 1149 - protein, 5 aa, synthetic construct
  REGION 1..5: note = source = /note="Description of Artificial Sequence: Synthetic peptide"
YFGMH

SEQ ID NO: 1150 - protein, 5 aa, synthetic construct
  REGION 1..5: note = source = /note="Description of Artificial Sequence: Synthetic peptide"
YFGMH

SEQ ID NO: 1151 - protein, 5 aa, synthetic construct
  REGION 1..5: note = source = /note="Description of Artificial Sequence: Synthetic peptide"
YFGMH

SEQ ID NO: 1152 - protein, 5 aa, synthetic construct
  REGION 1..5: note = source = /note="Description of Artificial Sequence: Synthetic peptide"
YFGMH

SEQ ID NO: 1153 - protein, 5 aa, synthetic construct
  REGION 1..5: note = source = /note="Description of Artificial Sequence: Synthetic peptide"
YFGMH

SEQ ID NO: 1154 - protein, 5 aa, synthetic construct
  REGION 1..5: note = source = /note="Description of Artificial Sequence: Synthetic peptide"
YFGMH

SEQ ID NO: 1155 - protein, 5 aa, synthetic construct
  REGION 1..5: note = source = /note="Description of Artificial Sequence: Synthetic peptide"
SYGMH

SEQ ID NO: 1156 - protein, 5 aa, synthetic construct
  REGION 1..5: note = source = /note="Description of Artificial Sequence: Synthetic peptide"
SYGMH

SEQ ID NO: 1157 - protein, 5 aa, synthetic construct
  REGION 1..5: note = source = /note="Description of Artificial Sequence: Synthetic peptide"
SYGMH

SEQ ID NO: 1158 - protein, 5 aa, synthetic construct
  REGION 1..5: note = source = /note="Description of Artificial Sequence: Synthetic peptide"
SYGMH

SEQ ID NO: 1159 - protein, 5 aa, synthetic construct
  REGION 1..5: note = source = /note="Description of Artificial Sequence: Synthetic peptide"
SYGMH

SEQ ID NO: 1160 - protein, 5 aa, synthetic construct
  REGION 1..5: note = source = /note="Description of Artificial Sequence: Synthetic peptide"
SYGMH

SEQ ID NO: 1161 - protein, 5 aa, synthetic construct
  REGION 1..5: note = source = /note="Description of Artificial Sequence: Synthetic peptide"
SYGMH

SEQ ID NO: 1162 - protein, 5 aa, synthetic construct
  REGION 1..5: note = source = /note="Description of Artificial Sequence: Synthetic peptide"
SYGMH

SEQ ID NO: 1163 - protein, 5 aa, synthetic construct
  REGION 1..5: note = source = /note="Description of Artificial Sequence: Synthetic peptide"
SYGMH

SEQ ID NO: 1164 - protein, 5 aa, synthetic construct
  REGION 1..5: note = source = /note="Description of Artificial Sequence: Synthetic peptide"
SYGMH

SEQ ID NO: 1165 - protein, 5 aa, synthetic construct
  REGION 1..5: note = source = /note="Description of Artificial Sequence: Synthetic peptide"
SYGMH

SEQ ID NO: 1166 - protein, 5 aa, synthetic construct
  REGION 1..5: note = source = /note="Description of Artificial Sequence: Synthetic peptide"
SYGMH

SEQ ID NO: 1167 - protein, 5 aa, synthetic construct
  REGION 1..5: note = source = /note="Description of Artificial Sequence: Synthetic peptide"
SYGMH

SEQ ID NO: 1168 - protein, 5 aa, synthetic construct
  REGION 1..5: note = source = /note="Description of Artificial Sequence: Synthetic peptide"
SYGMH

SEQ ID NO: 1169 - protein, 5 aa, synthetic construct
  REGION 1..5: note = source = /note="Description of Artificial Sequence: Synthetic peptide"
SYGMH

SEQ ID NO: 1170 - protein, 5 aa, synthetic construct
  REGION 1..5: note = source = /note="Description of Artificial Sequence: Synthetic peptide"
NYGMH

SEQ ID NO: 1171 - protein, 5 aa, synthetic construct
  REGION 1..5: note = source = /note="Description of Artificial Sequence: Synthetic peptide"
NYGMH

SEQ ID NO: 1172 - protein, 5 aa, synthetic construct
  REGION 1..5: note = source = /note="Description of Artificial Sequence: Synthetic peptide"
NYGMH

SEQ ID NO: 1173 - protein, 5 aa, synthetic construct
  REGION 1..5: note = source = /note="Description of Artificial Sequence: Synthetic peptide"
NYGMH

SEQ ID NO: 1174 - protein, 5 aa, synthetic construct
  REGION 1..5: note = source = /note="Description of Artificial Sequence: Synthetic peptide"
NYGMH

SEQ ID NO: 1175 - protein, 5 aa, synthetic construct
  REGION 1..5: note = source = /note="Description of Artificial Sequence: Synthetic peptide"
NYGMH

SEQ ID NO: 1176 - protein, 5 aa, synthetic construct
  REGION 1..5: note = source = /note="Description of Artificial Sequence: Synthetic peptide"
NYGMH

SEQ ID NO: 1177 - protein, 5 aa, synthetic construct
  REGION 1..5: note = source = /note="Description of Artificial Sequence: Synthetic peptide"
NYGMH

SEQ ID NO: 1178 - protein, 7 aa, synthetic construct
  REGION 1..7: note = source = /note="Description of Artificial Sequence: Synthetic peptide"
SGGYYWS

SEQ ID NO: 1179 - protein, 7 aa, synthetic construct
  REGION 1..7: note = source = /note="Description of Artificial Sequence: Synthetic peptide"
SGGYYWS

SEQ ID NO: 1180 - protein, 7 aa, synthetic construct
  REGION 1..7: note = source = /note="Description of Artificial Sequence: Synthetic peptide"
SGGYYWS

SEQ ID NO: 1181 - protein, 7 aa, synthetic construct
  REGION 1..7: note = source = /note="Description of Artificial Sequence: Synthetic peptide"
SGGYYWS

SEQ ID NO: 1182 - protein, 7 aa, synthetic construct
  REGION 1..7: note = source = /note="Description of Artificial Sequence: Synthetic peptide"
SGGYYWS

SEQ ID NO: 1183 - protein, 7 aa, synthetic construct
  REGION 1..7: note = source = /note="Description of Artificial Sequence: Synthetic peptide"
SGGYYWS

SEQ ID NO: 1184 - protein, 7 aa, synthetic construct
  REGION 1..7: note = source = /note="Description of Artificial Sequence: Synthetic peptide"
SGGYYWS

SEQ ID NO: 1185 - protein, 5 aa, synthetic construct
  REGION 1..5: note = source = /note="Description of Artificial Sequence: Synthetic peptide"
GYYIH

SEQ ID NO: 1186 - protein, 5 aa, synthetic construct
  REGION 1..5: note = source = /note="Description of Artificial Sequence: Synthetic peptide"
GYYIH

SEQ ID NO: 1187 - protein, 5 aa, synthetic construct
  REGION 1..5: note = source = /note="Description of Artificial Sequence: Synthetic peptide"
GYYIH

SEQ ID NO: 1188 - protein, 5 aa, synthetic construct
  REGION 1..5: note = source = /note="Description of Artificial Sequence: Synthetic peptide"
GYYIH

SEQ ID NO: 1189 - protein, 5 aa, synthetic construct
  REGION 1..5: note = source = /note="Description of Artificial Sequence: Synthetic peptide"
GYYIH

SEQ ID NO: 1190 - protein, 5 aa, synthetic construct
  REGION 1..5: note = source = /note="Description of Artificial Sequence: Synthetic peptide"
GYYIH

SEQ ID NO: 1191 - protein, 5 aa, synthetic construct
  REGION 1..5: note = source = /note="Description of Artificial Sequence: Synthetic peptide"
GYYIH

SEQ ID NO: 1192 - protein, 5 aa, synthetic construct
  REGION 1..5: note = source = /note="Description of Artificial Sequence: Synthetic peptide"
GYYIH

SEQ ID NO: 1193 - protein, 5 aa, synthetic construct
  REGION 1..5: note = source = /note="Description of Artificial Sequence: Synthetic peptide"
GYYIH

SEQ ID NO: 1194 - protein, 5 aa, synthetic construct
  REGION 1..5: note = source = /note="Description of Artificial Sequence: Synthetic peptide"
GYYIH

SEQ ID NO: 1195 - protein, 5 aa, synthetic construct
  REGION 1..5: note = source = /note="Description of Artificial Sequence: Synthetic peptide"
GYYIH

SEQ ID NO: 1196 - protein, 5 aa, synthetic construct
  REGION 1..5: note = source = /note="Description of Artificial Sequence: Synthetic peptide"
GYYIH

SEQ ID NO: 1197 - protein, 5 aa, synthetic construct
  REGION 1..5: note = source = /note="Description of Artificial Sequence: Synthetic peptide"
GYYIH

SEQ ID NO: 1198 - protein, 5 aa, synthetic construct
  REGION 1..5: note = source = /note="Description of Artificial Sequence: Synthetic peptide"
GYYIH

SEQ ID NO: 1199 - protein, 5 aa, synthetic construct
  REGION 1..5: note = source = /note="Description of Artificial Sequence: Synthetic peptide"
GYYIH

SEQ ID NO: 1200 - protein, 5 aa, synthetic construct
  REGION 1..5: note = source = /note="Description of Artificial Sequence: Synthetic peptide"
GYYIH

SEQ ID NO: 1201 - protein, 5 aa, synthetic construct
  REGION 1..5: note = source = /note="Description of Artificial Sequence: Synthetic peptide"
GYYIH

SEQ ID NO: 1202 - protein, 5 aa, synthetic construct
  REGION 1..5: note = source = /note="Description of Artificial Sequence: Synthetic peptide"
GYYIH

SEQ ID NO: 1203 - protein, 5 aa, synthetic construct
  REGION 1..5: note = source = /note="Description of Artificial Sequence: Synthetic peptide"
GYYIH

SEQ ID NO: 1204 - protein, 5 aa, synthetic construct
  REGION 1..5: note = source = /note="Description of Artificial Sequence: Synthetic peptide"
GYYIH

SEQ ID NO: 1205 - protein, 5 aa, synthetic construct
  REGION 1..5: note = source = /note="Description of Artificial Sequence: Synthetic peptide"
GYYIH

SEQ ID NO: 1206 - protein, 5 aa, synthetic construct
  REGION 1..5: note = source = /note="Description of Artificial Sequence: Synthetic peptide"
GYYIH

SEQ ID NO: 1207 - protein, 5 aa, synthetic construct
  REGION 1..5: note = source = /note="Description of Artificial Sequence: Synthetic peptide"
GYYIH

SEQ ID NO: 1208 - protein, 5 aa, synthetic construct
  REGION 1..5: note = source = /note="Description of Artificial Sequence: Synthetic peptide"
GYYIH

SEQ ID NO: 1209 - protein, 5 aa, synthetic construct
  REGION 1..5: note = source = /note="Description of Artificial Sequence: Synthetic peptide"
GYYIH

SEQ ID NO: 1210 - protein, 5 aa, synthetic construct
  REGION 1..5: note = source = /note="Description of Artificial Sequence: Synthetic peptide"
GYYIH

SEQ ID NO: 1211 - protein, 5 aa, synthetic construct
  REGION 1..5: note = source = /note="Description of Artificial Sequence: Synthetic peptide"
GYYIH

SEQ ID NO: 1212 - protein, 5 aa, synthetic construct
  REGION 1..5: note = source = /note="Description of Artificial Sequence: Synthetic peptide"
GYYIH

SEQ ID NO: 1213 - protein, 5 aa, synthetic construct
  REGION 1..5: note = source = /note="Description of Artificial Sequence: Synthetic peptide"
GYYIH

SEQ ID NO: 1214 - protein, 5 aa, synthetic construct
  REGION 1..5: note = source = /note="Description of Artificial Sequence: Synthetic peptide"
GYYIH

SEQ ID NO: 1215 - protein, 5 aa, synthetic construct
  REGION 1..5: note = source = /note="Description of Artificial Sequence: Synthetic peptide"
GYYIH

SEQ ID NO: 1216 - protein, 5 aa, synthetic construct
  REGION 1..5: note = source = /note="Description of Artificial Sequence: Synthetic peptide"
GYYIH

SEQ ID NO: 1217 - protein, 5 aa, synthetic construct
  REGION 1..5: note = source = /note="Description of Artificial Sequence: Synthetic peptide"
GYYIH

SEQ ID NO: 1218 - protein, 5 aa, synthetic construct
  REGION 1..5: note = source = /note="Description of Artificial Sequence: Synthetic peptide"
GYYIH

SEQ ID NO: 1219 - protein, 5 aa, synthetic construct
  REGION 1..5: note = source = /note="Description of Artificial Sequence: Synthetic peptide"
GYYIH

SEQ ID NO: 1220 - protein, 5 aa, synthetic construct
  REGION 1..5: note = source = /note="Description of Artificial Sequence: Synthetic peptide"
GYYIH

SEQ ID NO: 1221 - protein, 5 aa, synthetic construct
  REGION 1..5: note = source = /note="Description of Artificial Sequence: Synthetic peptide"
GYYIH

SEQ ID NO: 1222 - protein, 5 aa, synthetic construct
  REGION 1..5: note = source = /note="Description of Artificial Sequence: Synthetic peptide"
GYYIH

SEQ ID NO: 1223 - protein, 5 aa, synthetic construct
  REGION 1..5: note = source = /note="Description of Artificial Sequence: Synthetic peptide"
GYYMH

SEQ ID NO: 1224 - protein, 5 aa, synthetic construct
  REGION 1..5: note = source = /note="Description of Artificial Sequence: Synthetic peptide"
GYYMH

SEQ ID NO: 1225 - protein, 5 aa, synthetic construct
  REGION 1..5: note = source = /note="Description of Artificial Sequence: Synthetic peptide"
GYYMH

SEQ ID NO: 1226 - protein, 5 aa, synthetic construct
  REGION 1..5: note = source = /note="Description of Artificial Sequence: Synthetic peptide"
GYYMH

SEQ ID NO: 1227 - protein, 5 aa, synthetic construct
  REGION 1..5: note = source = /note="Description of Artificial Sequence: Synthetic peptide"
GYYMH

SEQ ID NO: 1228 - protein, 5 aa, synthetic construct
  REGION 1..5: note = source = /note="Description of Artificial Sequence: Synthetic peptide"
GYYMH

SEQ ID NO: 1229 - protein, 5 aa, synthetic construct
  REGION 1..5: note = source = /note="Description of Artificial Sequence: Synthetic peptide"
GYYMH

SEQ ID NO: 1230 - protein, 5 aa, synthetic construct
  REGION 1..5: note = source = /note="Description of Artificial Sequence: Synthetic peptide"
GYYMH

SEQ ID NO: 1231 - protein, 5 aa, synthetic construct
  REGION 1..5: note = source = /note="Description of Artificial Sequence: Synthetic peptide"
GYYMH

SEQ ID NO: 1232 - protein, 5 aa, synthetic construct
  REGION 1..5: note = source = /note="Description of Artificial Sequence: Synthetic peptide"
GYYMH

SEQ ID NO: 1233 - protein, 5 aa, synthetic construct
  REGION 1..5: note = source = /note="Description of Artificial Sequence: Synthetic peptide"
GYYMH

SEQ ID NO: 1234 - protein, 5 aa, synthetic construct
  REGION 1..5: note = source = /note="Description of Artificial Sequence: Synthetic peptide"
GYYMH

SEQ ID NO: 1235 - protein, 5 aa, synthetic construct
  REGION 1..5: note = source = /note="Description of Artificial Sequence: Synthetic peptide"
GYYMH

SEQ ID NO: 1236 - protein, 5 aa, synthetic construct
  REGION 1..5: note = source = /note="Description of Artificial Sequence: Synthetic peptide"
GYYMH

SEQ ID NO: 1237 - protein, 5 aa, synthetic construct
  REGION 1..5: note = source = /note="Description of Artificial Sequence: Synthetic peptide"
NFGMH

SEQ ID NO: 1238 - protein, 5 aa, synthetic construct
  REGION 1..5: note = source = /note="Description of Artificial Sequence: Synthetic peptide"
YFGMH

SEQ ID NO: 1239 - protein, 5 aa, synthetic construct
  REGION 1..5: note = source = /note="Description of Artificial Sequence: Synthetic peptide"
GYYMH

SEQ ID NO: 1240 - protein, 5 aa, synthetic construct
  REGION 1..5: note = source = /note="Description of Artificial Sequence: Synthetic peptide"
SYGIH

SEQ ID NO: 1241 - protein, 5 aa, synthetic construct
  REGION 1..5: note = source = /note="Description of Artificial Sequence: Synthetic peptide"
SYDIN

SEQ ID NO: 1242 - protein, 5 aa, synthetic construct
  REGION 1..5: note = source = /note="Description of Artificial Sequence: Synthetic peptide"
SYGIH

SEQ ID NO: 1243 - protein, 5 aa, synthetic construct
  REGION 1..5: note = source = /note="Description of Artificial Sequence: Synthetic peptide"
SYGIH

SEQ ID NO: 1244 - protein, 5 aa, synthetic construct
  REGION 1..5: note = source = /note="Description of Artificial Sequence: Synthetic peptide"
SYGIH

SEQ ID NO: 1245 - protein, 5 aa, synthetic construct
  REGION 1..5: note = source = /note="Description of Artificial Sequence: Synthetic peptide"
SYGIH

SEQ ID NO: 1246 - protein, 5 aa, synthetic construct
  REGION 1..5: note = source = /note="Description of Artificial Sequence: Synthetic peptide"
SYGIH

SEQ ID NO: 1247 - protein, 5 aa, synthetic construct
  REGION 1..5: note = source = /note="Description of Artificial Sequence: Synthetic peptide"
SYGIH

SEQ ID NO: 1248 - protein, 5 aa, synthetic construct
  REGION 1..5: note = source = /note="Description of Artificial Sequence: Synthetic peptide"
SYDIN

SEQ ID NO: 1249 - protein, 5 aa, synthetic construct
  REGION 1..5: note = source = /note="Description of Artificial Sequence: Synthetic peptide"
SYDIN

SEQ ID NO: 1250 - protein, 5 aa, synthetic construct
  REGION 1..5: note = source = /note="Description of Artificial Sequence: Synthetic peptide"
SYDIN

SEQ ID NO: 1251 - protein, 5 aa, synthetic construct
  REGION 1..5: note = source = /note="Description of Artificial Sequence: Synthetic peptide"
SYDIN

SEQ ID NO: 1252 - protein, 5 aa, synthetic construct
  REGION 1..5: note = source = /note="Description of Artificial Sequence: Synthetic peptide"
SYDIN

SEQ ID NO: 1253 - protein, 5 aa, synthetic construct
  REGION 1..5: note = source = /note="Description of Artificial Sequence: Synthetic peptide"
SYDIN

SEQ ID NO: 1254 - protein, 5 aa, synthetic construct
  REGION 1..5: note = source = /note="Description of Artificial Sequence: Synthetic peptide"
SYDIN

SEQ ID NO: 1255 - protein, 5 aa, synthetic construct
  REGION 1..5: note = source = /note="Description of Artificial Sequence: Synthetic peptide"
SYDIN

SEQ ID NO: 1256 - protein, 5 aa, synthetic construct
  REGION 1..5: note = source = /note="Description of Artificial Sequence: Synthetic peptide"
SYGIH

SEQ ID NO: 1257 - protein, 17 aa, synthetic construct
  REGION 1..17: note = source = /note="Description of Artificial Sequence: Synthetic peptide"
WINPNSGGTNYAQKFQG

SEQ ID NO: 1258 - protein, 17 aa, synthetic construct
  REGION 1..17: note = source = /note="Description of Artificial Sequence: Synthetic peptide"
VIWYDGSNENYADSVKG

SEQ ID NO: 1259 - protein, 17 aa, synthetic construct
  REGION 1..17: note = source = /note="Description of Artificial Sequence: Synthetic peptide"
VIWYDGSNKYYADSVKG

SEQ ID NO: 1260 - protein, 17 aa, synthetic construct
  REGION 1..17: note = source = /note="Description of Artificial Sequence: Synthetic peptide"
VIWYDGSNKYYADSVKG

SEQ ID NO: 1261 - protein, 17 aa, synthetic construct
  REGION 1..17: note = source = /note="Description of Artificial Sequence: Synthetic peptide"
WINPDSGGTDYSQRFQG

SEQ ID NO: 1262 - protein, 17 aa, synthetic construct
  REGION 1..17: note = source = /note="Description of Artificial Sequence: Synthetic peptide"
WINPDSGGTDYSQRFQG

SEQ ID NO: 1263 - protein, 17 aa, synthetic construct
  REGION 1..17: note = source = /note="Description of Artificial Sequence: Synthetic peptide"
WISPNSGDTSYAQKFQD

SEQ ID NO: 1264 - protein, 17 aa, synthetic construct
  REGION 1..17: note = source = /note="Description of Artificial Sequence: Synthetic peptide"
WISPNNGDTNYAQKFQD

SEQ ID NO: 1265 - protein, 16 aa, synthetic construct
  REGION 1..16: note = source = /note="Description of Artificial Sequence: Synthetic peptide"
YIYYSGSTYYNPSLKS

SEQ ID NO: 1266 - protein, 17 aa, synthetic construct
  REGION 1..17: note = source = /note="Description of Artificial Sequence: Synthetic peptide"
AIWFDGSDKYYADSVKG

SEQ ID NO: 1267 - protein, 17 aa, synthetic construct
  REGION 1..17: note = source = /note="Description of Artificial Sequence: Synthetic peptide"
VIWYDGSNKYYADSVKG

SEQ ID NO: 1268 - protein, 17 aa, synthetic construct
  REGION 1..17: note = source = /note="Description of Artificial Sequence: Synthetic peptide"
AIWYDGNNKYYADSVKG

SEQ ID NO: 1269 - protein, 16 aa, synthetic construct
  REGION 1..16: note = source = /note="Description of Artificial Sequence: Synthetic peptide"
RIYTSGSTNYNPSLKS

SEQ ID NO: 1270 - protein, 16 aa, synthetic construct
  REGION 1..16: note = source = /note="Description of Artificial Sequence: Synthetic peptide"
RIYTSGSTNYNPSLKS

SEQ ID NO: 1271 - protein, 17 aa, synthetic construct
  REGION 1..17: note = source = /note="Description of Artificial Sequence: Synthetic peptide"
VIWYDASNKYYADAVKG

SEQ ID NO: 1272 - protein, 17 aa, synthetic construct
  REGION 1..17: note = source = /note="Description of Artificial Sequence: Synthetic peptide"
VIWYDASNKYYADSVKG

SEQ ID NO: 1273 - protein, 17 aa, synthetic construct
  REGION 1..17: note = source = /note="Description of Artificial Sequence: Synthetic peptide"
VIWYDGSNKYYADAVKG

SEQ ID NO: 1274 - protein, 17 aa, synthetic construct
  REGION 1..17: note = source = /note="Description of Artificial Sequence: Synthetic peptide"
VIWYDASNKYYADAVKG

SEQ ID NO: 1275 - protein, 17 aa, synthetic construct
  REGION 1..17: note = source = /note="Description of Artificial Sequence: Synthetic peptide"
VIWYDASNKYYADAVKG

SEQ ID NO: 1276 - protein, 17 aa, synthetic construct
  REGION 1..17: note = source = /note="Description of Artificial Sequence: Synthetic peptide"
VIWYDASNKYYADAVKG

SEQ ID NO: 1277 - protein, 17 aa, synthetic construct
  REGION 1..17: note = source = /note="Description of Artificial Sequence: Synthetic peptide"
VIWYDASNENYADAVKG

SEQ ID NO: 1278 - protein, 17 aa, synthetic construct
  REGION 1..17: note = source = /note="Description of Artificial Sequence: Synthetic peptide"
VIWYDASNENYADAVKG

SEQ ID NO: 1279 - protein, 17 aa, synthetic construct
  REGION 1..17: note = source = /note="Description of Artificial Sequence: Synthetic peptide"
VIWYDASNENYADAVKG

SEQ ID NO: 1280 - protein, 17 aa, synthetic construct
  REGION 1..17: note = source = /note="Description of Artificial Sequence: Synthetic peptide"
VIWYDASNENYADSVKG

SEQ ID NO: 1281 - protein, 17 aa, synthetic construct
  REGION 1..17: note = source = /note="Description of Artificial Sequence: Synthetic peptide"
VIWYDGSNENYADAVKG

SEQ ID NO: 1282 - protein, 17 aa, synthetic construct
  REGION 1..17: note = source = /note="Description of Artificial Sequence: Synthetic peptide"
VIWYDASNENYADAVKG

SEQ ID NO: 1283 - protein, 17 aa, synthetic construct
  REGION 1..17: note = source = /note="Description of Artificial Sequence: Synthetic peptide"
VIWYDASNENYADAVKG

SEQ ID NO: 1284 - protein, 17 aa, synthetic construct
  REGION 1..17: note = source = /note="Description of Artificial Sequence: Synthetic peptide"
VIWYDGSNENYADSVKG

SEQ ID NO: 1285 - protein, 17 aa, synthetic construct
  REGION 1..17: note = source = /note="Description of Artificial Sequence: Synthetic peptide"
VIWYDASNENYADAVKG

SEQ ID NO: 1286 - protein, 17 aa, synthetic construct
  REGION 1..17: note = source = /note="Description of Artificial Sequence: Synthetic peptide"
VIWYDASNENYADAVKG

SEQ ID NO: 1287 - protein, 17 aa, synthetic construct
  REGION 1..17: note = source = /note="Description of Artificial Sequence: Synthetic peptide"
VIWYDASNENYADAVKG

SEQ ID NO: 1288 - protein, 17 aa, synthetic construct
  REGION 1..17: note = source = /note="Description of Artificial Sequence: Synthetic peptide"
VIWYDASNENYADAVKG

SEQ ID NO: 1289 - protein, 17 aa, synthetic construct
  REGION 1..17: note = source = /note="Description of Artificial Sequence: Synthetic peptide"
VIWYDASNENYADAVKG

SEQ ID NO: 1290 - protein, 17 aa, synthetic construct
  REGION 1..17: note = source = /note="Description of Artificial Sequence: Synthetic peptide"
VIWYDASNENYADAVKG

SEQ ID NO: 1291 - protein, 17 aa, synthetic construct
  REGION 1..17: note = source = /note="Description of Artificial Sequence: Synthetic peptide"
VIWYDASNENYADAVKG

SEQ ID NO: 1292 - protein, 17 aa, synthetic construct
  REGION 1..17: note = source = /note="Description of Artificial Sequence: Synthetic peptide"
VIWYDGSNENYADAVKG

SEQ ID NO: 1293 - protein, 17 aa, synthetic construct
  REGION 1..17: note = source = /note="Description of Artificial Sequence: Synthetic peptide"
VIWYDASNENYADSVKG

SEQ ID NO: 1294 - protein, 17 aa, synthetic construct
  REGION 1..17: note = source = /note="Description of Artificial Sequence: Synthetic peptide"
VIWYDASNENYADAVKG

SEQ ID NO: 1295 - protein, 17 aa, synthetic construct
  REGION 1..17: note = source = /note="Description of Artificial Sequence: Synthetic peptide"
VIWYDASNENYADAVKG

SEQ ID NO: 1296 - protein, 17 aa, synthetic construct
  REGION 1..17: note = source = /note="Description of Artificial Sequence: Synthetic peptide"
VIWYDASNKYYADAVKG

SEQ ID NO: 1297 - protein, 17 aa, synthetic construct
  REGION 1..17: note = source = /note="Description of Artificial Sequence: Synthetic peptide"
VIWYDASNKYYADAVKG

SEQ ID NO: 1298 - protein, 17 aa, synthetic construct
  REGION 1..17: note = source = /note="Description of Artificial Sequence: Synthetic peptide"
VIWYDASNKYYADAVKG

SEQ ID NO: 1299 - protein, 17 aa, synthetic construct
  REGION 1..17: note = source = /note="Description of Artificial Sequence: Synthetic peptide"
VIWYDASNKYYADAVKG

SEQ ID NO: 1300 - protein, 17 aa, synthetic construct
  REGION 1..17: note = source = /note="Description of Artificial Sequence: Synthetic peptide"
VIWYDASNKYYADAVKG

SEQ ID NO: 1301 - protein, 17 aa, synthetic construct
  REGION 1..17: note = source = /note="Description of Artificial Sequence: Synthetic peptide"
VIWYDASNKYYADAVKG

SEQ ID NO: 1302 - protein, 17 aa, synthetic construct
  REGION 1..17: note = source = /note="Description of Artificial Sequence: Synthetic peptide"
VIWYDASNKYYADAVKG

SEQ ID NO: 1303 - protein, 17 aa, synthetic construct
  REGION 1..17: note = source = /note="Description of Artificial Sequence: Synthetic peptide"
VIWYDASNKYYADSVKG

SEQ ID NO: 1304 - protein, 17 aa, synthetic construct
  REGION 1..17: note = source = /note="Description of Artificial Sequence: Synthetic peptide"
VIWYDGSNKYYADAVKG

SEQ ID NO: 1305 - protein, 17 aa, synthetic construct
  REGION 1..17: note = source = /note="Description of Artificial Sequence: Synthetic peptide"
VIWYDASNKYYADAVKG

SEQ ID NO: 1306 - protein, 17 aa, synthetic construct
  REGION 1..17: note = source = /note="Description of Artificial Sequence: Synthetic peptide"
VIWYDASNKYYADAVKG

SEQ ID NO: 1307 - protein, 17 aa, synthetic construct
  REGION 1..17: note = source = /note="Description of Artificial Sequence: Synthetic peptide"
VIWYDASNKYYADAVKG

SEQ ID NO: 1308 - protein, 17 aa, synthetic construct
  REGION 1..17: note = source = /note="Description of Artificial Sequence: Synthetic peptide"
VIWYDASNKYYADAVKG

SEQ ID NO: 1309 - protein, 17 aa, synthetic construct
  REGION 1..17: note = source = /note="Description of Artificial Sequence: Synthetic peptide"
VIWYDGSNKYYADSVKG

SEQ ID NO: 1310 - protein, 17 aa, synthetic construct
  REGION 1..17: note = source = /note="Description of Artificial Sequence: Synthetic peptide"
VIWYDASNKYYADSVKG

SEQ ID NO: 1311 - protein, 17 aa, synthetic construct
  REGION 1..17: note = source = /note="Description of Artificial Sequence: Synthetic peptide"
VIWYDGSNKYYADAVKG

SEQ ID NO: 1312 - protein, 17 aa, synthetic construct
  REGION 1..17: note = source = /note="Description of Artificial Sequence: Synthetic peptide"
AIWYDANNKYYADAVKG

SEQ ID NO: 1313 - protein, 17 aa, synthetic construct
  REGION 1..17: note = source = /note="Description of Artificial Sequence: Synthetic peptide"
AIWYDANNKYYADAVKG

SEQ ID NO: 1314 - protein, 17 aa, synthetic construct
  REGION 1..17: note = source = /note="Description of Artificial Sequence: Synthetic peptide"
AIWYDANNKYYADAVKG

SEQ ID NO: 1315 - protein, 17 aa, synthetic construct
  REGION 1..17: note = source = /note="Description of Artificial Sequence: Synthetic peptide"
AIWYDANNKYYADAVKG

SEQ ID NO: 1316 - protein, 17 aa, synthetic construct
  REGION 1..17: note = source = /note="Description of Artificial Sequence: Synthetic peptide"
AIWYDANNKYYADAVKG

SEQ ID NO: 1317 - protein, 17 aa, synthetic construct
  REGION 1..17: note = source = /note="Description of Artificial Sequence: Synthetic peptide"
AIWYDANNKYYADAVKG

SEQ ID NO: 1318 - protein, 17 aa, synthetic construct
  REGION 1..17: note = source = /note="Description of Artificial Sequence: Synthetic peptide"
AIWYDANNKYYADAVKG

SEQ ID NO: 1319 - protein, 17 aa, synthetic construct
  REGION 1..17: note = source = /note="Description of Artificial Sequence: Synthetic peptide"
AIWYDGNNKYYADAVKG

SEQ ID NO: 1320 - protein, 17 aa, synthetic construct
  REGION 1..17: note = source = /note="Description of Artificial Sequence: Synthetic peptide"
AIWYDANNKYYADSVKG

SEQ ID NO: 1321 - protein, 17 aa, synthetic construct
  REGION 1..17: note = source = /note="Description of Artificial Sequence: Synthetic peptide"
AIWYDANNKYYADAVKG

SEQ ID NO: 1322 - protein, 17 aa, synthetic construct
  REGION 1..17: note = source = /note="Description of Artificial Sequence: Synthetic peptide"
AIWYDANNKYYADAVKG

SEQ ID NO: 1323 - protein, 17 aa, synthetic construct
  REGION 1..17: note = source = /note="Description of Artificial Sequence: Synthetic peptide"
VIWYDASNKYYEDAVKG

SEQ ID NO: 1324 - protein, 17 aa, synthetic construct
  REGION 1..17: note = source = /note="Description of Artificial Sequence: Synthetic peptide"
VIWYDGSNKYYEDSVKG

SEQ ID NO: 1325 - protein, 17 aa, synthetic construct
  REGION 1..17: note = source = /note="Description of Artificial Sequence: Synthetic peptide"
VIWYDGSNKYYEDAVKG

SEQ ID NO: 1326 - protein, 17 aa, synthetic construct
  REGION 1..17: note = source = /note="Description of Artificial Sequence: Synthetic peptide"
VIWYDASNKYYEDSVKG

SEQ ID NO: 1327 - protein, 17 aa, synthetic construct
  REGION 1..17: note = source = /note="Description of Artificial Sequence: Synthetic peptide"
AIWFDASDKYYADAVKG

SEQ ID NO: 1328 - protein, 17 aa, synthetic construct
  REGION 1..17: note = source = /note="Description of Artificial Sequence: Synthetic peptide"
AIWFDASDKYYADSVKG

SEQ ID NO: 1329 - protein, 17 aa, synthetic construct
  REGION 1..17: note = source = /note="Description of Artificial Sequence: Synthetic peptide"
AIWFDGSDKYYADAVKG

SEQ ID NO: 1330 - protein, 17 aa, synthetic construct
  REGION 1..17: note = source = /note="Description of Artificial Sequence: Synthetic peptide"
AIWFDASDKYYADAVKG

SEQ ID NO: 1331 - protein, 17 aa, synthetic construct
  REGION 1..17: note = source = /note="Description of Artificial Sequence: Synthetic peptide"
AIWFDASDKYYADAVKG

SEQ ID NO: 1332 - protein, 17 aa, synthetic construct
  REGION 1..17: note = source = /note="Description of Artificial Sequence: Synthetic peptide"
AIWFDASDKYYADAVKG

SEQ ID NO: 1333 - protein, 17 aa, synthetic construct
  REGION 1..17: note = source = /note="Description of Artificial Sequence: Synthetic peptide"
AIWFDASDKYYADAVKG

SEQ ID NO: 1334 - protein, 17 aa, synthetic construct
  REGION 1..17: note = source = /note="Description of Artificial Sequence: Synthetic peptide"
AIWFDASDKYYADAVKG

SEQ ID NO: 1335 - protein, 16 aa, synthetic construct
  REGION 1..16: note = source = /note="Description of Artificial Sequence: Synthetic peptide"
YIYYSGSTYYNPSLKS

SEQ ID NO: 1336 - protein, 16 aa, synthetic construct
  REGION 1..16: note = source = /note="Description of Artificial Sequence: Synthetic peptide"
YIYYSGSTYYNPSLKS

SEQ ID NO: 1337 - protein, 16 aa, synthetic construct
  REGION 1..16: note = source = /note="Description of Artificial Sequence: Synthetic peptide"
YIYYSGSTYYNPSLKS

SEQ ID NO: 1338 - protein, 16 aa, synthetic construct
  REGION 1..16: note = source = /note="Description of Artificial Sequence: Synthetic peptide"
YIYYSGSTYYNPSLKS

SEQ ID NO: 1339 - protein, 16 aa, synthetic construct
  REGION 1..16: note = source = /note="Description of Artificial Sequence: Synthetic peptide"
YIYYSGSTYYNPSLKS

SEQ ID NO: 1340 - protein, 16 aa, synthetic construct
  REGION 1..16: note = source = /note="Description of Artificial Sequence: Synthetic peptide"
YIYYSGSTYYNPSLKS

SEQ ID NO: 1341 - protein, 16 aa, synthetic construct
  REGION 1..16: note = source = /note="Description of Artificial Sequence: Synthetic peptide"
YIYYSGSTYYNPSLKS

SEQ ID NO: 1342 - protein, 17 aa, synthetic construct
  REGION 1..17: note = source = /note="Description of Artificial Sequence: Synthetic peptide"
WINPESGGTDYSQRFQG

SEQ ID NO: 1343 - protein, 17 aa, synthetic construct
  REGION 1..17: note = source = /note="Description of Artificial Sequence: Synthetic peptide"
WINPESGGTDYSQRFQG

SEQ ID NO: 1344 - protein, 17 aa, synthetic construct
  REGION 1..17: note = source = /note="Description of Artificial Sequence: Synthetic peptide"
WINPDAGGTDYSQRFQG

SEQ ID NO: 1345 - protein, 17 aa, synthetic construct
  REGION 1..17: note = source = /note="Description of Artificial Sequence: Synthetic peptide"
WINPDAGGTDYSQRFQG

SEQ ID NO: 1346 - protein, 17 aa, synthetic construct
  REGION 1..17: note = source = /note="Description of Artificial Sequence: Synthetic peptide"
WINPDSGGTDYSQRFQG

SEQ ID NO: 1347 - protein, 17 aa, synthetic construct
  REGION 1..17: note = source = /note="Description of Artificial Sequence: Synthetic peptide"
WINPDSGGTDYSQRFQG

SEQ ID NO: 1348 - protein, 17 aa, synthetic construct
  REGION 1..17: note = source = /note="Description of Artificial Sequence: Synthetic peptide"
WINPDSGGTDYSQRFQG

SEQ ID NO: 1349 - protein, 17 aa, synthetic construct
  REGION 1..17: note = source = /note="Description of Artificial Sequence: Synthetic peptide"
WINPDAGGTDYSQRFQG

SEQ ID NO: 1350 - protein, 17 aa, synthetic construct
  REGION 1..17: note = source = /note="Description of Artificial Sequence: Synthetic peptide"
WINPDAGGTDYSQRFQG

SEQ ID NO: 1351 - protein, 17 aa, synthetic construct
  REGION 1..17: note = source = /note="Description of Artificial Sequence: Synthetic peptide"
WINPDAGGTDYSQRFQG

SEQ ID NO: 1352 - protein, 17 aa, synthetic construct
  REGION 1..17: note = source = /note="Description of Artificial Sequence: Synthetic peptide"
WINPESGGTDYSQRFQG

SEQ ID NO: 1353 - protein, 17 aa, synthetic construct
  REGION 1..17: note = source = /note="Description of Artificial Sequence: Synthetic peptide"
WISPNSGETSYAQKFQD

SEQ ID NO: 1354 - protein, 17 aa, synthetic construct
  REGION 1..17: note = source = /note="Description of Artificial Sequence: Synthetic peptide"
WISPNSGDTSYAQKFQD

SEQ ID NO: 1355 - protein, 17 aa, synthetic construct
  REGION 1..17: note = source = /note="Description of Artificial Sequence: Synthetic peptide"
WISPNSGETSYAQKFQD

SEQ ID NO: 1356 - protein, 17 aa, synthetic construct
  REGION 1..17: note = source = /note="Description of Artificial Sequence: Synthetic peptide"
WISPNSGETSYAQKFQD

SEQ ID NO: 1357 - protein, 17 aa, synthetic construct
  REGION 1..17: note = source = /note="Description of Artificial Sequence: Synthetic peptide"
WISPNSGDTSYAQKFQD

SEQ ID NO: 1358 - protein, 17 aa, synthetic construct
  REGION 1..17: note = source = /note="Description of Artificial Sequence: Synthetic peptide"
WISPNSGETSYAQKFQD

SEQ ID NO: 1359 - protein, 17 aa, synthetic construct
  REGION 1..17: note = source = /note="Description of Artificial Sequence: Synthetic peptide"
WISPNSGDTSYAQKFQD

SEQ ID NO: 1360 - protein, 17 aa, synthetic construct
  REGION 1..17: note = source = /note="Description of Artificial Sequence: Synthetic peptide"
WISPNSGETSYAQKFQD

SEQ ID NO: 1361 - protein, 17 aa, synthetic construct
  REGION 1..17: note = source = /note="Description of Artificial Sequence: Synthetic peptide"
WISPNSGETSYAQKFQD

SEQ ID NO: 1362 - protein, 17 aa, synthetic construct
  REGION 1..17: note = source = /note="Description of Artificial Sequence: Synthetic peptide"
WINPESGGTDYSQRFQG

SEQ ID NO: 1363 - protein, 17 aa, synthetic construct
  REGION 1..17: note = source = /note="Description of Artificial Sequence: Synthetic peptide"
WINPESGGTDYSQRFQG

SEQ ID NO: 1364 - protein, 17 aa, synthetic construct
  REGION 1..17: note = source = /note="Description of Artificial Sequence: Synthetic peptide"
WINPDSGGTDYSQRFQG

SEQ ID NO: 1365 - protein, 17 aa, synthetic construct
  REGION 1..17: note = source = /note="Description of Artificial Sequence: Synthetic peptide"
WINPESGGTDYSQRFQG

SEQ ID NO: 1366 - protein, 17 aa, synthetic construct
  REGION 1..17: note = source = /note="Description of Artificial Sequence: Synthetic peptide"
WINPESGGTDYSQRFQG

SEQ ID NO: 1367 - protein, 17 aa, synthetic construct
  REGION 1..17: note = source = /note="Description of Artificial Sequence: Synthetic peptide"
WISPNQGETNYAQKFQD

SEQ ID NO: 1368 - protein, 17 aa, synthetic construct
  REGION 1..17: note = source = /note="Description of Artificial Sequence: Synthetic peptide"
WISPNQGDTNYAQKFQD

SEQ ID NO: 1369 - protein, 17 aa, synthetic construct
  REGION 1..17: note = source = /note="Description of Artificial Sequence: Synthetic peptide"
WISPNQGETNYAQKFQD

SEQ ID NO: 1370 - protein, 17 aa, synthetic construct
  REGION 1..17: note = source = /note="Description of Artificial Sequence: Synthetic peptide"
WISPNNGETNYAQKFQD

SEQ ID NO: 1371 - protein, 17 aa, synthetic construct
  REGION 1..17: note = source = /note="Description of Artificial Sequence: Synthetic peptide"
WISPNNGDTNYAQKFQD

SEQ ID NO: 1372 - protein, 17 aa, synthetic construct
  REGION 1..17: note = source = /note="Description of Artificial Sequence: Synthetic peptide"
WISPNQGDTNYAQKFQD

SEQ ID NO: 1373 - protein, 17 aa, synthetic construct
  REGION 1..17: note = source = /note="Description of Artificial Sequence: Synthetic peptide"
WISPNNGETNYAQKFQD

SEQ ID NO: 1374 - protein, 17 aa, synthetic construct
  REGION 1..17: note = source = /note="Description of Artificial Sequence: Synthetic peptide"
WISPNQGETNYAQKFQD

SEQ ID NO: 1375 - protein, 17 aa, synthetic construct
  REGION 1..17: note = source = /note="Description of Artificial Sequence: Synthetic peptide"
WISPNNGDTNYAQKFQD

SEQ ID NO: 1376 - protein, 17 aa, synthetic construct
  REGION 1..17: note = source = /note="Description of Artificial Sequence: Synthetic peptide"
WISPNQGDTNYAQKFQD

SEQ ID NO: 1377 - protein, 17 aa, synthetic construct
  REGION 1..17: note = source = /note="Description of Artificial Sequence: Synthetic peptide"
WISPNNGETNYAQKFQD

SEQ ID NO: 1378 - protein, 17 aa, synthetic construct
  REGION 1..17: note = source = /note="Description of Artificial Sequence: Synthetic peptide"
WISPNQGETNYAQKFQD

SEQ ID NO: 1379 - protein, 17 aa, synthetic construct
  REGION 1..17: note = source = /note="Description of Artificial Sequence: Synthetic peptide"
WISPNQGETNYAQKFQD

SEQ ID NO: 1380 - protein, 17 aa, synthetic construct
  REGION 1..17: note = source = /note="Description of Artificial Sequence: Synthetic peptide"
WINPNSGGTNYAQKFQG

SEQ ID NO: 1381 - protein, 17 aa, synthetic construct
  REGION 1..17: note = source = /note="Description of Artificial Sequence: Synthetic peptide"
WINPNSGGTNYAQKFQG

SEQ ID NO: 1382 - protein, 17 aa, synthetic construct
  REGION 1..17: note = source = /note="Description of Artificial Sequence: Synthetic peptide"
WINPNSGGTNYAQKFQG

SEQ ID NO: 1383 - protein, 17 aa, synthetic construct
  REGION 1..17: note = source = /note="Description of Artificial Sequence: Synthetic peptide"
WINPNSGGTNYAQKFQG

SEQ ID NO: 1384 - protein, 17 aa, synthetic construct
  REGION 1..17: note = source = /note="Description of Artificial Sequence: Synthetic peptide"
WINPNSGGTNYAQKFQG

SEQ ID NO: 1385 - protein, 17 aa, synthetic construct
  REGION 1..17: note = source = /note="Description of Artificial Sequence: Synthetic peptide"
WINPNSGGTNYAQKFQG

SEQ ID NO: 1386 - protein, 17 aa, synthetic construct
  REGION 1..17: note = source = /note="Description of Artificial Sequence: Synthetic peptide"
WINPNSGGTNYAQKFQG

SEQ ID NO: 1387 - protein, 17 aa, synthetic construct
  REGION 1..17: note = source = /note="Description of Artificial Sequence: Synthetic peptide"
WINPNSGGTNYAQKFQG

SEQ ID NO: 1388 - protein, 17 aa, synthetic construct
  REGION 1..17: note = source = /note="Description of Artificial Sequence: Synthetic peptide"
WINPNSGGTNYAQKFQG

SEQ ID NO: 1389 - protein, 17 aa, synthetic construct
  REGION 1..17: note = source = /note="Description of Artificial Sequence: Synthetic peptide"
WINPNSGGTNYAQKFQG

SEQ ID NO: 1390 - protein, 17 aa, synthetic construct
  REGION 1..17: note = source = /note="Description of Artificial Sequence: Synthetic peptide"
WINPNSGGTNYAQKFQG

SEQ ID NO: 1391 - protein, 17 aa, synthetic construct
  REGION 1..17: note = source = /note="Description of Artificial Sequence: Synthetic peptide"
WINPNSGGTNYAQKFQG

SEQ ID NO: 1392 - protein, 17 aa, synthetic construct
  REGION 1..17: note = source = /note="Description of Artificial Sequence: Synthetic peptide"
WINPNSGGTNYAQKFQG

SEQ ID NO: 1393 - protein, 17 aa, synthetic construct
  REGION 1..17: note = source = /note="Description of Artificial Sequence: Synthetic peptide"
WINPNSGGTNYAQKFQG

SEQ ID NO: 1394 - protein, 17 aa, synthetic construct
  REGION 1..17: note = source = /note="Description of Artificial Sequence: Synthetic peptide"
VIWYDASNENYADAVKG

SEQ ID NO: 1395 - protein, 17 aa, synthetic construct
  REGION 1..17: note = source = /note="Description of Artificial Sequence: Synthetic peptide"
VIWYDASNKYYADAVKG

SEQ ID NO: 1396 - protein, 17 aa, synthetic construct
  REGION 1..17: note = source = /note="Description of Artificial Sequence: Synthetic peptide"
WINPNSGGTNYAQKFQG

SEQ ID NO: 1397 - protein, 17 aa, synthetic construct
  REGION 1..17: note = source = /note="Description of Artificial Sequence: Synthetic peptide"
VIWYDGSNKFHADSVKG

SEQ ID NO: 1398 - protein, 17 aa, synthetic construct
  REGION 1..17: note = source = /note="Description of Artificial Sequence: Synthetic peptide"
WMNPNSGNTGYAQKFQG

SEQ ID NO: 1399 - protein, 17 aa, synthetic construct
  REGION 1..17: note = source = /note="Description of Artificial Sequence: Synthetic peptide"
VIWYDASNKFHADAVKG

SEQ ID NO: 1400 - protein, 17 aa, synthetic construct
  REGION 1..17: note = source = /note="Description of Artificial Sequence: Synthetic peptide"
VIWYDASNKFHADAVKG

SEQ ID NO: 1401 - protein, 17 aa, synthetic construct
  REGION 1..17: note = source = /note="Description of Artificial Sequence: Synthetic peptide"
VIWYDASNKFHADAVKG

SEQ ID NO: 1402 - protein, 17 aa, synthetic construct
  REGION 1..17: note = source = /note="Description of Artificial Sequence: Synthetic peptide"
VIWYDASNKFHADAVKG

SEQ ID NO: 1403 - protein, 17 aa, synthetic construct
  REGION 1..17: note = source = /note="Description of Artificial Sequence: Synthetic peptide"
VIWYDASNKFHADSVKG

SEQ ID NO: 1404 - protein, 17 aa, synthetic construct
  REGION 1..17: note = source = /note="Description of Artificial Sequence: Synthetic peptide"
VIWYDGSNKFHADAVKG

SEQ ID NO: 1405 - protein, 17 aa, synthetic construct
  REGION 1..17: note = source = /note="Description of Artificial Sequence: Synthetic peptide"
WMNPNSGGTGYAQKFQG

SEQ ID NO: 1406 - protein, 17 aa, synthetic construct
  REGION 1..17: note = source = /note="Description of Artificial Sequence: Synthetic peptide"
WMNPNSGNTGYAQKFQG

SEQ ID NO: 1407 - protein, 17 aa, synthetic construct
  REGION 1..17: note = source = /note="Description of Artificial Sequence: Synthetic peptide"
WMNPNSGGTGYAQKFQG

SEQ ID NO: 1408 - protein, 17 aa, synthetic construct
  REGION 1..17: note = source = /note="Description of Artificial Sequence: Synthetic peptide"
WMNPNSGGTGYAQKFQG

SEQ ID NO: 1409 - protein, 17 aa, synthetic construct
  REGION 1..17: note = source = /note="Description of Artificial Sequence: Synthetic peptide"
WMNPNSGGTGYAQKFQG

SEQ ID NO: 1410 - protein, 17 aa, synthetic construct
  REGION 1..17: note = source = /note="Description of Artificial Sequence: Synthetic peptide"
WMNPNSGNTGYAQKFQG

SEQ ID NO: 1411 - protein, 17 aa, synthetic construct
  REGION 1..17: note = source = /note="Description of Artificial Sequence: Synthetic peptide"
WMNPNSGGTGYAQKFQG

SEQ ID NO: 1412 - protein, 17 aa, synthetic construct
  REGION 1..17: note = source = /note="Description of Artificial Sequence: Synthetic peptide"
WMNPNSGGTGYAQKFQG

SEQ ID NO: 1413 - protein, 17 aa, synthetic construct
  REGION 1..17: note = source = /note="Description of Artificial Sequence: Synthetic peptide"
VIWYDASNKFHADAVKG

SEQ ID NO: 1414 - protein, 19 aa, synthetic construct
  REGION 1..19: note = source = /note="Description of Artificial Sequence: Synthetic peptide"
GGDYVWGTYRPHYYYGMDV

SEQ ID NO: 1415 - protein, 12 aa, synthetic construct
  REGION 1..12: note = source = /note="Description of Artificial Sequence: Synthetic peptide"
DGTIFGVVLGDY

SEQ ID NO: 1416 - protein, 12 aa, synthetic construct
  REGION 1..12: note = source = /note="Description of Artificial Sequence: Synthetic peptide"
DGTIFGVLLGDY

SEQ ID NO: 1417 - protein, 11 aa, synthetic construct
  REGION 1..11: note = source = /note="Description of Artificial Sequence: Synthetic peptide"
DRTIFGVVLDY

SEQ ID NO: 1418 - protein, 14 aa, synthetic construct
  REGION 1..14: note = source = /note="Description of Artificial Sequence: Synthetic peptide"
EATIFGMVIVPFDY

SEQ ID NO: 1419 - protein, 14 aa, synthetic construct
  REGION 1..14: note = source = /note="Description of Artificial Sequence: Synthetic peptide"
EATIFGMVIVPFDY

SEQ ID NO: 1420 - protein, 14 aa, synthetic construct
  REGION 1..14: note = source = /note="Description of Artificial Sequence: Synthetic peptide"
EATIFGMLIVPFDY

SEQ ID NO: 1421 - protein, 14 aa, synthetic construct
  REGION 1..14: note = source = /note="Description of Artificial Sequence: Synthetic peptide"
EATIFGMLIVPFDY

SEQ ID NO: 1422 - protein, 16 aa, synthetic construct
  REGION 1..16: note = source = /note="Description of Artificial Sequence: Synthetic peptide"
DRITIFGVVMGGGMDV

SEQ ID NO: 1423 - protein, 11 aa, synthetic construct
  REGION 1..11: note = source = /note="Description of Artificial Sequence: Synthetic peptide"
DQAIFGVVPDY

SEQ ID NO: 1424 - protein, 12 aa, synthetic construct
  REGION 1..12: note = source = /note="Description of Artificial Sequence: Synthetic peptide"
DGTIFGVLLGDY

SEQ ID NO: 1425 - protein, 11 aa, synthetic construct
  REGION 1..11: note = source = /note="Description of Artificial Sequence: Synthetic peptide"
DRTIFGVVLEY

SEQ ID NO: 1426 - protein, 9 aa, synthetic construct
  REGION 1..9: note = source = /note="Description of Artificial Sequence: Synthetic peptide"
DVAVAGFDY

SEQ ID NO: 1427 - protein, 9 aa, synthetic construct
  REGION 1..9: note = source = /note="Description of Artificial Sequence: Synthetic peptide"
DVAVAGFDY

SEQ ID NO: 1428 - protein, 12 aa, synthetic construct
  REGION 1..12: note = source = /note="Description of Artificial Sequence: Synthetic peptide"
DGTIFGVLLGDY

SEQ ID NO: 1429 - protein, 12 aa, synthetic construct
  REGION 1..12: note = source = /note="Description of Artificial Sequence: Synthetic peptide"
DGTIFGVLLGDY

SEQ ID NO: 1430 - protein, 12 aa, synthetic construct
  REGION 1..12: note = source = /note="Description of Artificial Sequence: Synthetic peptide"
DGTIFGVLLGDY

SEQ ID NO: 1431 - protein, 12 aa, synthetic construct
  REGION 1..12: note = source = /note="Description of Artificial Sequence: Synthetic peptide"
DGTIFGVLLGDY

SEQ ID NO: 1432 - protein, 12 aa, synthetic construct
  REGION 1..12: note = source = /note="Description of Artificial Sequence: Synthetic peptide"
DGTIFGVLLGDY

SEQ ID NO: 1433 - protein, 12 aa, synthetic construct
  REGION 1..12: note = source = /note="Description of Artificial Sequence: Synthetic peptide"
DRTIFGVLLGDY

SEQ ID NO: 1434 - protein, 12 aa, synthetic construct
  REGION 1..12: note = source = /note="Description of Artificial Sequence: Synthetic peptide"
DGTIFGVVLGDY

SEQ ID NO: 1435 - protein, 12 aa, synthetic construct
  REGION 1..12: note = source = /note="Description of Artificial Sequence: Synthetic peptide"
DGTIFGVVLGDY

SEQ ID NO: 1436 - protein, 12 aa, synthetic construct
  REGION 1..12: note = source = /note="Description of Artificial Sequence: Synthetic peptide"
DGTIFGVVLGDY

SEQ ID NO: 1437 - protein, 12 aa, synthetic construct
  REGION 1..12: note = source = /note="Description of Artificial Sequence: Synthetic peptide"
DGTIFGVVLGDY

SEQ ID NO: 1438 - protein, 12 aa, synthetic construct
  REGION 1..12: note = source = /note="Description of Artificial Sequence: Synthetic peptide"
DGTIFGVVLGDY

SEQ ID NO: 1439 - protein, 12 aa, synthetic construct
  REGION 1..12: note = source = /note="Description of Artificial Sequence: Synthetic peptide"
DRTIFGVVLGDY

SEQ ID NO: 1440 - protein, 12 aa, synthetic construct
  REGION 1..12: note = source = /note="Description of Artificial Sequence: Synthetic peptide"
DGTIFGVVLGDY

SEQ ID NO: 1441 - protein, 12 aa, synthetic construct
  REGION 1..12: note = source = /note="Description of Artificial Sequence: Synthetic peptide"
DGTIFGVVLGDY

SEQ ID NO: 1442 - protein, 12 aa, synthetic construct
  REGION 1..12: note = source = /note="Description of Artificial Sequence: Synthetic peptide"
DGTIFGVVLGDY

SEQ ID NO: 1443 - protein, 12 aa, synthetic construct
  REGION 1..12: note = source = /note="Description of Artificial Sequence: Synthetic peptide"
DGTIFGVVLGDY

SEQ ID NO: 1444 - protein, 12 aa, synthetic construct
  REGION 1..12: note = source = /note="Description of Artificial Sequence: Synthetic peptide"
DGTIFGVVLGDY

SEQ ID NO: 1445 - protein, 12 aa, synthetic construct
  REGION 1..12: note = source = /note="Description of Artificial Sequence: Synthetic peptide"
DGTIFGVVLGDY

SEQ ID NO: 1446 - protein, 12 aa, synthetic construct
  REGION 1..12: note = source = /note="Description of Artificial Sequence: Synthetic peptide"
DGTIFGVVLGDY

SEQ ID NO: 1447 - protein, 12 aa, synthetic construct
  REGION 1..12: note = source = /note="Description of Artificial Sequence: Synthetic peptide"
DGTIFGVVLGDY

SEQ ID NO: 1448 - protein, 12 aa, synthetic construct
  REGION 1..12: note = source = /note="Description of Artificial Sequence: Synthetic peptide"
DGTIFGVVLGDY

SEQ ID NO: 1449 - protein, 12 aa, synthetic construct
  REGION 1..12: note = source = /note="Description of Artificial Sequence: Synthetic peptide"
DGTIFGVVLGDY

SEQ ID NO: 1450 - protein, 12 aa, synthetic construct
  REGION 1..12: note = source = /note="Description of Artificial Sequence: Synthetic peptide"
DGTIFGVVLGDY

SEQ ID NO: 1451 - protein, 12 aa, synthetic construct
  REGION 1..12: note = source = /note="Description of Artificial Sequence: Synthetic peptide"
DRTIFGVVLGDY

SEQ ID NO: 1452 - protein, 12 aa, synthetic construct
  REGION 1..12: note = source = /note="Description of Artificial Sequence: Synthetic peptide"
DGTIFGVVLGDY

SEQ ID NO: 1453 - protein, 11 aa, synthetic construct
  REGION 1..11: note = source = /note="Description of Artificial Sequence: Synthetic peptide"
DRTIFGVVLDY

SEQ ID NO: 1454 - protein, 11 aa, synthetic construct
  REGION 1..11: note = source = /note="Description of Artificial Sequence: Synthetic peptide"
DRTIFGVVLDY

SEQ ID NO: 1455 - protein, 11 aa, synthetic construct
  REGION 1..11: note = source = /note="Description of Artificial Sequence: Synthetic peptide"
DRTIFGVVLDY

SEQ ID NO: 1456 - protein, 11 aa, synthetic construct
  REGION 1..11: note = source = /note="Description of Artificial Sequence: Synthetic peptide"
DRTIFGVVLDY

SEQ ID NO: 1457 - protein, 11 aa, synthetic construct
  REGION 1..11: note = source = /note="Description of Artificial Sequence: Synthetic peptide"
DRTIFGVVLDY

SEQ ID NO: 1458 - protein, 11 aa, synthetic construct
  REGION 1..11: note = source = /note="Description of Artificial Sequence: Synthetic peptide"
DRTIFGVVLDY

SEQ ID NO: 1459 - protein, 11 aa, synthetic construct
  REGION 1..11: note = source = /note="Description of Artificial Sequence: Synthetic peptide"
DRTIFGVVLDY

SEQ ID NO: 1460 - protein, 11 aa, synthetic construct
  REGION 1..11: note = source = /note="Description of Artificial Sequence: Synthetic peptide"
DRTIFGVVLDY

SEQ ID NO: 1461 - protein, 11 aa, synthetic construct
  REGION 1..11: note = source = /note="Description of Artificial Sequence: Synthetic peptide"
DRTIFGVVLDY

SEQ ID NO: 1462 - protein, 12 aa, synthetic construct
  REGION 1..12: note = source = /note="Description of Artificial Sequence: Synthetic peptide"
DGTIFGVLLGDY

SEQ ID NO: 1463 - protein, 12 aa, synthetic construct
  REGION 1..12: note = source = /note="Description of Artificial Sequence: Synthetic peptide"
DRTIFGVLLGDY

SEQ ID NO: 1464 - protein, 12 aa, synthetic construct
  REGION 1..12: note = source = /note="Description of Artificial Sequence: Synthetic peptide"
DGTIFGVLLGDY

SEQ ID NO: 1465 - protein, 12 aa, synthetic construct
  REGION 1..12: note = source = /note="Description of Artificial Sequence: Synthetic peptide"
DRTIFGVLLGDY

SEQ ID NO: 1466 - protein, 12 aa, synthetic construct
  REGION 1..12: note = source = /note="Description of Artificial Sequence: Synthetic peptide"
DGTIFGVLLGDY

SEQ ID NO: 1467 - protein, 12 aa, synthetic construct
  REGION 1..12: note = source = /note="Description of Artificial Sequence: Synthetic peptide"
DGTIFGVLLGDY

SEQ ID NO: 1468 - protein, 12 aa, synthetic construct
  REGION 1..12: note = source = /note="Description of Artificial Sequence: Synthetic peptide"
DGTIFGVLLGDY

SEQ ID NO: 1469 - protein, 11 aa, synthetic construct
  REGION 1..11: note = source = /note="Description of Artificial Sequence: Synthetic peptide"
DRTIFGVVLEY

SEQ ID NO: 1470 - protein, 11 aa, synthetic construct
  REGION 1..11: note = source = /note="Description of Artificial Sequence: Synthetic peptide"
DRTIFGVVLEY

SEQ ID NO: 1471 - protein, 11 aa, synthetic construct
  REGION 1..11: note = source = /note="Description of Artificial Sequence: Synthetic peptide"
DRTIFGVVLEY

SEQ ID NO: 1472 - protein, 11 aa, synthetic construct
  REGION 1..11: note = source = /note="Description of Artificial Sequence: Synthetic peptide"
DRTIFGVVLEY

SEQ ID NO: 1473 - protein, 11 aa, synthetic construct
  REGION 1..11: note = source = /note="Description of Artificial Sequence: Synthetic peptide"
DRTIFGVVLEY

SEQ ID NO: 1474 - protein, 11 aa, synthetic construct
  REGION 1..11: note = source = /note="Description of Artificial Sequence: Synthetic peptide"
DRTIFGVVLEY

SEQ ID NO: 1475 - protein, 11 aa, synthetic construct
  REGION 1..11: note = source = /note="Description of Artificial Sequence: Synthetic peptide"
DRTIFGVVLEY

SEQ ID NO: 1476 - protein, 11 aa, synthetic construct
  REGION 1..11: note = source = /note="Description of Artificial Sequence: Synthetic peptide"
DRTIFGVVLEY

SEQ ID NO: 1477 - protein, 11 aa, synthetic construct
  REGION 1..11: note = source = /note="Description of Artificial Sequence: Synthetic peptide"
DRTIFGVVLEY

SEQ ID NO: 1478 - protein, 11 aa, synthetic construct
  REGION 1..11: note = source = /note="Description of Artificial Sequence: Synthetic peptide"
DRTIFGVVLEY

SEQ ID NO: 1479 - protein, 11 aa, synthetic construct
  REGION 1..11: note = source = /note="Description of Artificial Sequence: Synthetic peptide"
DRTIFGVVLEY

SEQ ID NO: 1480 - protein, 11 aa, synthetic construct
  REGION 1..11: note = source = /note="Description of Artificial Sequence: Synthetic peptide"
GITIFGHGFEY

SEQ ID NO: 1481 - protein, 11 aa, synthetic construct
  REGION 1..11: note = source = /note="Description of Artificial Sequence: Synthetic peptide"
GITIFGHGFEY

SEQ ID NO: 1482 - protein, 11 aa, synthetic construct
  REGION 1..11: note = source = /note="Description of Artificial Sequence: Synthetic peptide"
GITIFGHGFEY

SEQ ID NO: 1483 - protein, 11 aa, synthetic construct
  REGION 1..11: note = source = /note="Description of Artificial Sequence: Synthetic peptide"
GITIFGHGFEY

SEQ ID NO: 1484 - protein, 11 aa, synthetic construct
  REGION 1..11: note = source = /note="Description of Artificial Sequence: Synthetic peptide"
DQAIFGVVPDY

SEQ ID NO: 1485 - protein, 11 aa, synthetic construct
  REGION 1..11: note = source = /note="Description of Artificial Sequence: Synthetic peptide"
DQAIFGVVPDY

SEQ ID NO: 1486 - protein, 11 aa, synthetic construct
  REGION 1..11: note = source = /note="Description of Artificial Sequence: Synthetic peptide"
DQAIFGVVPDY

SEQ ID NO: 1487 - protein, 11 aa, synthetic construct
  REGION 1..11: note = source = /note="Description of Artificial Sequence: Synthetic peptide"
DQAIFGVVPDY

SEQ ID NO: 1488 - protein, 11 aa, synthetic construct
  REGION 1..11: note = source = /note="Description of Artificial Sequence: Synthetic peptide"
DQAIFGVVPDY

SEQ ID NO: 1489 - protein, 11 aa, synthetic construct
  REGION 1..11: note = source = /note="Description of Artificial Sequence: Synthetic peptide"
DQAIFGVVPDY

SEQ ID NO: 1490 - protein, 11 aa, synthetic construct
  REGION 1..11: note = source = /note="Description of Artificial Sequence: Synthetic peptide"
DQAIFGVVPDY

SEQ ID NO: 1491 - protein, 11 aa, synthetic construct
  REGION 1..11: note = source = /note="Description of Artificial Sequence: Synthetic peptide"
DQAIFGVVPDY

SEQ ID NO: 1492 - protein, 16 aa, synthetic construct
  REGION 1..16: note = source = /note="Description of Artificial Sequence: Synthetic peptide"
DRITIFGVVMGGGMDV

SEQ ID NO: 1493 - protein, 16 aa, synthetic construct
  REGION 1..16: note = source = /note="Description of Artificial Sequence: Synthetic peptide"
DRITIFGVVMGGGMDV

SEQ ID NO: 1494 - protein, 16 aa, synthetic construct
  REGION 1..16: note = source = /note="Description of Artificial Sequence: Synthetic peptide"
DRITIFGVVMGGGMDV

SEQ ID NO: 1495 - protein, 16 aa, synthetic construct
  REGION 1..16: note = source = /note="Description of Artificial Sequence: Synthetic peptide"
DRITIFGVVMGGGMDV

SEQ ID NO: 1496 - protein, 16 aa, synthetic construct
  REGION 1..16: note = source = /note="Description of Artificial Sequence: Synthetic peptide"
DRITIFGVVMGGGMDV

SEQ ID NO: 1497 - protein, 16 aa, synthetic construct
  REGION 1..16: note = source = /note="Description of Artificial Sequence: Synthetic peptide"
DRITIFGVVMGGGMDV

SEQ ID NO: 1498 - protein, 16 aa, synthetic construct
  REGION 1..16: note = source = /note="Description of Artificial Sequence: Synthetic peptide"
DRITIFGVVMGGGMDV

SEQ ID NO: 1499 - protein, 14 aa, synthetic construct
  REGION 1..14: note = source = /note="Description of Artificial Sequence: Synthetic peptide"
EATIFGMVIVPFDY

SEQ ID NO: 1500 - protein, 14 aa, synthetic construct
  REGION 1..14: note = source = /note="Description of Artificial Sequence: Synthetic peptide"
EATIFGMVIVPFDY

SEQ ID NO: 1501 - protein, 14 aa, synthetic construct
  REGION 1..14: note = source = /note="Description of Artificial Sequence: Synthetic peptide"
EATIFGMVIVPFDY

SEQ ID NO: 1502 - protein, 14 aa, synthetic construct
  REGION 1..14: note = source = /note="Description of Artificial Sequence: Synthetic peptide"
EATIFGMVIVPFDY

SEQ ID NO: 1503 - protein, 14 aa, synthetic construct
  REGION 1..14: note = source = /note="Description of Artificial Sequence: Synthetic peptide"
EATIFGMVIVPFDY

SEQ ID NO: 1504 - protein, 14 aa, synthetic construct
  REGION 1..14: note = source = /note="Description of Artificial Sequence: Synthetic peptide"
EATIFGMVIVPFDY

SEQ ID NO: 1505 - protein, 14 aa, synthetic construct
  REGION 1..14: note = source = /note="Description of Artificial Sequence: Synthetic peptide"
EATIFGMVIVPFDY

SEQ ID NO: 1506 - protein, 14 aa, synthetic construct
  REGION 1..14: note = source = /note="Description of Artificial Sequence: Synthetic peptide"
EATIFGMVIVPFDY

SEQ ID NO: 1507 - protein, 14 aa, synthetic construct
  REGION 1..14: note = source = /note="Description of Artificial Sequence: Synthetic peptide"
EATIFGMVIVPFDY

SEQ ID NO: 1508 - protein, 14 aa, synthetic construct
  REGION 1..14: note = source = /note="Description of Artificial Sequence: Synthetic peptide"
EATIFGMVIVPFDY

SEQ ID NO: 1509 - protein, 14 aa, synthetic construct
  REGION 1..14: note = source = /note="Description of Artificial Sequence: Synthetic peptide"
EATIFGMVIVPFDY

SEQ ID NO: 1510 - protein, 14 aa, synthetic construct
  REGION 1..14: note = source = /note="Description of Artificial Sequence: Synthetic peptide"
EATIFGMLIVPFDY

SEQ ID NO: 1511 - protein, 14 aa, synthetic construct
  REGION 1..14: note = source = /note="Description of Artificial Sequence: Synthetic peptide"
EATIFGMLIVPFDY

SEQ ID NO: 1512 - protein, 14 aa, synthetic construct
  REGION 1..14: note = source = /note="Description of Artificial Sequence: Synthetic peptide"
EATIFGMLIVPFDY

SEQ ID NO: 1513 - protein, 14 aa, synthetic construct
  REGION 1..14: note = source = /note="Description of Artificial Sequence: Synthetic peptide"
EATIFGMLIVPFDY

SEQ ID NO: 1514 - protein, 14 aa, synthetic construct
  REGION 1..14: note = source = /note="Description of Artificial Sequence: Synthetic peptide"
EATIFGMLIVPFDY

SEQ ID NO: 1515 - protein, 14 aa, synthetic construct
  REGION 1..14: note = source = /note="Description of Artificial Sequence: Synthetic peptide"
EATIFGMLIVPFDY

SEQ ID NO: 1516 - protein, 14 aa, synthetic construct
  REGION 1..14: note = source = /note="Description of Artificial Sequence: Synthetic peptide"
EATIFGMLIVPFDY

SEQ ID NO: 1517 - protein, 14 aa, synthetic construct
  REGION 1..14: note = source = /note="Description of Artificial Sequence: Synthetic peptide"
EATIFGMLIVPFDY

SEQ ID NO: 1518 - protein, 14 aa, synthetic construct
  REGION 1..14: note = source = /note="Description of Artificial Sequence: Synthetic peptide"
EATIFGMLIVPFDY

SEQ ID NO: 1519 - protein, 14 aa, synthetic construct
  REGION 1..14: note = source = /note="Description of Artificial Sequence: Synthetic peptide"
EATIFGMVIVPFDY

SEQ ID NO: 1520 - protein, 14 aa, synthetic construct
  REGION 1..14: note = source = /note="Description of Artificial Sequence: Synthetic peptide"
EATIFGMVIVPFDY

SEQ ID NO: 1521 - protein, 14 aa, synthetic construct
  REGION 1..14: note = source = /note="Description of Artificial Sequence: Synthetic peptide"
EATIFGMVIVPFDY

SEQ ID NO: 1522 - protein, 14 aa, synthetic construct
  REGION 1..14: note = source = /note="Description of Artificial Sequence: Synthetic peptide"
EATIFGMVIVPFDY

SEQ ID NO: 1523 - protein, 14 aa, synthetic construct
  REGION 1..14: note = source = /note="Description of Artificial Sequence: Synthetic peptide"
EATIFGMVIVPFDY

SEQ ID NO: 1524 - protein, 14 aa, synthetic construct
  REGION 1..14: note = source = /note="Description of Artificial Sequence: Synthetic peptide"
EATIFGMLIVPFDY

SEQ ID NO: 1525 - protein, 14 aa, synthetic construct
  REGION 1..14: note = source = /note="Description of Artificial Sequence: Synthetic peptide"
EATIFGMLIVPFDY

SEQ ID NO: 1526 - protein, 14 aa, synthetic construct
  REGION 1..14: note = source = /note="Description of Artificial Sequence: Synthetic peptide"
EATIFGMLIVPFDY

SEQ ID NO: 1527 - protein, 14 aa, synthetic construct
  REGION 1..14: note = source = /note="Description of Artificial Sequence: Synthetic peptide"
EATIFGMLIVPFDY

SEQ ID NO: 1528 - protein, 14 aa, synthetic construct
  REGION 1..14: note = source = /note="Description of Artificial Sequence: Synthetic peptide"
EATIFGMLIVPFDY

SEQ ID NO: 1529 - protein, 14 aa, synthetic construct
  REGION 1..14: note = source = /note="Description of Artificial Sequence: Synthetic peptide"
EATIFGMLIVPFDY

SEQ ID NO: 1530 - protein, 14 aa, synthetic construct
  REGION 1..14: note = source = /note="Description of Artificial Sequence: Synthetic peptide"
EATIFGMLIVPFDY

SEQ ID NO: 1531 - protein, 14 aa, synthetic construct
  REGION 1..14: note = source = /note="Description of Artificial Sequence: Synthetic peptide"
EATIFGMLIVPFDY

SEQ ID NO: 1532 - protein, 14 aa, synthetic construct
  REGION 1..14: note = source = /note="Description of Artificial Sequence: Synthetic peptide"
EATIFGMLIVPFDY

SEQ ID NO: 1533 - protein, 14 aa, synthetic construct
  REGION 1..14: note = source = /note="Description of Artificial Sequence: Synthetic peptide"
EATIFGMLIVPFDY

SEQ ID NO: 1534 - protein, 14 aa, synthetic construct
  REGION 1..14: note = source = /note="Description of Artificial Sequence: Synthetic peptide"
EATIFGMLIVPFDY

SEQ ID NO: 1535 - protein, 14 aa, synthetic construct
  REGION 1..14: note = source = /note="Description of Artificial Sequence: Synthetic peptide"
EATIFGMLIVPFDY

SEQ ID NO: 1536 - protein, 14 aa, synthetic construct
  REGION 1..14: note = source = /note="Description of Artificial Sequence: Synthetic peptide"
EATIFGMLIVPFDY

SEQ ID NO: 1537 - protein, 19 aa, synthetic construct
  REGION 1..19: note = source = /note="Description of Artificial Sequence: Synthetic peptide"
GGDYVWGTYRPHYYYGMDV

SEQ ID NO: 1538 - protein, 19 aa, synthetic construct
  REGION 1..19: note = source = /note="Description of Artificial Sequence: Synthetic peptide"
GGDYVWGTYRPHYYYGMDV

SEQ ID NO: 1539 - protein, 19 aa, synthetic construct
  REGION 1..19: note = source = /note="Description of Artificial Sequence: Synthetic peptide"
GGDYVWGTYRPHYYYGMDV

SEQ ID NO: 1540 - protein, 19 aa, synthetic construct
  REGION 1..19: note = source = /note="Description of Artificial Sequence: Synthetic peptide"
GGDYVWGTYRPHYYYGMDV

SEQ ID NO: 1541 - protein, 19 aa, synthetic construct
  REGION 1..19: note = source = /note="Description of Artificial Sequence: Synthetic peptide"
GGDYVWGTYRPHYYYGMDV

SEQ ID NO: 1542 - protein, 19 aa, synthetic construct
  REGION 1..19: note = source = /note="Description of Artificial Sequence: Synthetic peptide"
GGDYVWGTYRPHYYYGMDV

SEQ ID NO: 1543 - protein, 19 aa, synthetic construct
  REGION 1..19: note = source = /note="Description of Artificial Sequence: Synthetic peptide"
GGDYVWGTYRPHYYYGMDV

SEQ ID NO: 1544 - protein, 19 aa, synthetic construct
  REGION 1..19: note = source = /note="Description of Artificial Sequence: Synthetic peptide"
GGDYVWGTYRPHYYYGMDV

SEQ ID NO: 1545 - protein, 19 aa, synthetic construct
  REGION 1..19: note = source = /note="Description of Artificial Sequence: Synthetic peptide"
GGDYVWGTYRPHYYYGMDV

SEQ ID NO: 1546 - protein, 19 aa, synthetic construct
  REGION 1..19: note = source = /note="Description of Artificial Sequence: Synthetic peptide"
GGDYVWGTYRPHYYYGMDV

SEQ ID NO: 1547 - protein, 19 aa, synthetic construct
  REGION 1..19: note = source = /note="Description of Artificial Sequence: Synthetic peptide"
GGDYVWGTYRPHYYYGMDV

SEQ ID NO: 1548 - protein, 19 aa, synthetic construct
  REGION 1..19: note = source = /note="Description of Artificial Sequence: Synthetic peptide"
GGDYVWGTYRPHYYYGMDV

SEQ ID NO: 1549 - protein, 19 aa, synthetic construct
  REGION 1..19: note = source = /note="Description of Artificial Sequence: Synthetic peptide"
GGDYVFGTYRPHYYYGMDV

SEQ ID NO: 1550 - protein, 19 aa, synthetic construct
  REGION 1..19: note = source = /note="Description of Artificial Sequence: Synthetic peptide"
GGDYVFGTYRPHYYYGMDV

SEQ ID NO: 1551 - protein, 12 aa, synthetic construct
  REGION 1..12: note = source = /note="Description of Artificial Sequence: Synthetic peptide"
DRTIFGVVLGDY

SEQ ID NO: 1552 - protein, 12 aa, synthetic construct
  REGION 1..12: note = source = /note="Description of Artificial Sequence: Synthetic peptide"
DRTIFGVLLGDY

SEQ ID NO: 1553 - protein, 19 aa, synthetic construct
  REGION 1..19: note = source = /note="Description of Artificial Sequence: Synthetic peptide"
GGDYVWGTYRPHYYYGMDV

SEQ ID NO: 1554 - protein, 12 aa, synthetic construct
  REGION 1..12: note = source = /note="Description of Artificial Sequence: Synthetic peptide"
GKVAGMPEAFEI

SEQ ID NO: 1555 - protein, 20 aa, synthetic construct
  REGION 1..20: note = source = /note="Description of Artificial Sequence: Synthetic peptide"
GGDYVWGSYRPYYYYYGMDV

SEQ ID NO: 1556 - protein, 12 aa, synthetic construct
  REGION 1..12: note = source = /note="Description of Artificial Sequence: Synthetic peptide"
GKVAGMPEAFEI

SEQ ID NO: 1557 - protein, 12 aa, synthetic construct
  REGION 1..12: note = source = /note="Description of Artificial Sequence: Synthetic peptide"
GKVAGMPEAFEI

SEQ ID NO: 1558 - protein, 12 aa, synthetic construct
  REGION 1..12: note = source = /note="Description of Artificial Sequence: Synthetic peptide"
GKVAGMPEAFEI

SEQ ID NO: 1559 - protein, 12 aa, synthetic construct
  REGION 1..12: note = source = /note="Description of Artificial Sequence: Synthetic peptide"
GKVAGMPEAFEI

SEQ ID NO: 1560 - protein, 12 aa, synthetic construct
  REGION 1..12: note = source = /note="Description of Artificial Sequence: Synthetic peptide"
GKVAGMPEAFEI

SEQ ID NO: 1561 - protein, 12 aa, synthetic construct
  REGION 1..12: note = source = /note="Description of Artificial Sequence: Synthetic peptide"
GKVAGMPEAFEI

SEQ ID NO: 1562 - protein, 20 aa, synthetic construct
  REGION 1..20: note = source = /note="Description of Artificial Sequence: Synthetic peptide"
GGDYVWGSYRPYYYYYGMDV

SEQ ID NO: 1563 - protein, 20 aa, synthetic construct
  REGION 1..20: note = source = /note="Description of Artificial Sequence: Synthetic peptide"
GGDYVWGSYRPYYYYYGMDV

SEQ ID NO: 1564 - protein, 20 aa, synthetic construct
  REGION 1..20: note = source = /note="Description of Artificial Sequence: Synthetic peptide"
GGDYVWGSYRPYYYYYGMDV

SEQ ID NO: 1565 - protein, 20 aa, synthetic construct
  REGION 1..20: note = source = /note="Description of Artificial Sequence: Synthetic peptide"
GGDYVWGSYRPYYYYYGMDV

SEQ ID NO: 1566 - protein, 20 aa, synthetic construct
  REGION 1..20: note = source = /note="Description of Artificial Sequence: Synthetic peptide"
GGDYVWGSYRPYYYYYGMDV

SEQ ID NO: 1567 - protein, 20 aa, synthetic construct
  REGION 1..20: note = source = /note="Description of Artificial Sequence: Synthetic peptide"
GGDYVWGSYRPYYYYYGMDV

SEQ ID NO: 1568 - protein, 20 aa, synthetic construct
  REGION 1..20: note = source = /note="Description of Artificial Sequence: Synthetic peptide"
GGDYVFGSYRPYYYYYGMDV

SEQ ID NO: 1569 - protein, 20 aa, synthetic construct
  REGION 1..20: note = source = /note="Description of Artificial Sequence: Synthetic peptide"
GGDYVFGSYRPYYYYYGMDV

SEQ ID NO: 1570 - protein, 12 aa, synthetic construct
  REGION 1..12: note = source = /note="Description of Artificial Sequence: Synthetic peptide"
GKVAGMPEAFEI

SEQ ID NO: 1571 - DNA, 333 bp, synthetic construct
  misc_feature 1..333: note = source = /note="Description of Artificial Sequence: Synthetic polynucleotide"
  source 1..333: mol_type = other DNA
cagtctgtgctgactcagccaccctcagcgtctgggacccccgggcagagggtcaccatctcttgttctggaagtagctccaacatcggaagtaatactgtaaactggtaccagcacctcccaggaacggcccccaaactcctcatctatactaataatcagcggccctcaggggtccctgaccgattctctggctccaagtctggcacctcagcctcccttgccatcagtgggctccagtctgaggatgaggctgattatttctgtgcaacattcgatgacagcctgaatggtccggtattcggcggagggaccaagctgaccgtcctaggt

SEQ ID NO: 1572 - DNA, 324 bp, synthetic construct
  misc_feature 1..324: note = source = /note="Description of Artificial Sequence: Synthetic polynucleotide"
  source 1..324: mol_type = other DNA
gacatccagatgacccagtctccatcctccctgtctgcatctataggagacagagtcaccatcacttgccgggcaagtcaggacattagagattatttaggctggtatcagcagaaaccagggaaagcccctaagcgcctgatctatggtgcatccagtttgcaaagtggggtcccttcaaggttcagcggcagtggatctgggacagaattcactctcacaatcagcagcctgcagcctgaagatttcgcaacttattactgtctacagcataataattaccccttcactttcggccctgggaccaaagtggatatcaaacga

SEQ ID NO: 1573 - DNA, 324 bp, synthetic construct; identical to SEQ ID NO: 1572
  misc_feature 1..324: note = source = /note="Description of Artificial Sequence: Synthetic polynucleotide"
  source 1..324: mol_type = other DNA

SEQ ID NO: 1574 - DNA, 321 bp, synthetic construct
  misc_feature 1..321: note = source = /note="Description of Artificial Sequence: Synthetic polynucleotide"
  source 1..321: mol_type = other DNA
gacatccagatgacccagtctccatcctccctgtctgcatctgtaggagacagagtcaccatcacttgccaggcgagtcaggacattagcaactatttaaattggtatcagcagaaaccagggaaagcccctaagctcctgatctacgatgcatccaatttggaaacaggggtcccatcaaggttcagtggaagtggatctgggacagattttagtttcaccatcagcagcctgcagcctgaagatattgcaacatattactgtcaacagtatgatattctcctcactttcggcggagggaccaaggtggagatcaagcga

SEQ ID NO: 1575 - DNA, 342 bp, synthetic construct
  misc_feature 1..342: note = source = /note="Description of Artificial Sequence: Synthetic polynucleotide"
  source 1..342: mol_type = other DNA
gacatcgtgatgacccagtctccagactccctggctgtgtctctgggcgagagggccaccatcaactgcaagtccagccagagtgttttatccagctccaacaataagaactacatagcttggtaccagcagcaaccaggacatcctcctaagctgctcatttactgggcatctacccgggaatccggggtccctgaccgattcagtggcagcgggtctgggacagatttcactctcaccatcagcagcctgcaggctgaagatgtggcagttttttactgtcaacaatattatagtactccgtggacgttcggccaagggaccaaggtggaaatcaaacga

SEQ ID NO: 1576 - DNA, 342 bp, synthetic construct
  misc_feature 1..342: note = source = /note="Description of Artificial Sequence: Synthetic polynucleotide"
  source 1..342: mol_type = other DNA
gacatcgtgatgacccagtctccagactccctggctgtgtctctgggcgagagggccaccatcaactgcaagtccagccagagtgttttatccagctccaacaataagaactacatagcttggtaccagcagaaaccaggacatcctcctaagctgctcatttactgggcatctacccgggaatccggggtccctgaccgattcagtggcagcgggtctgggacagatttcactctcaccatcagcagcctgcaggctgaagatgtggcagttttttactgtcaacaatattatagtactccgtggacgttcggccaagggaccaaggtggaaatcaaacga

SEQ ID NO: 1577 - DNA, 342 bp, synthetic construct
  misc_feature 1..342: note = source = /note="Description of Artificial Sequence: Synthetic polynucleotide"
  source 1..342: mol_type = other DNA
gacatcgtgatgacccagtctccagactccctgtctgtgtctctgggcgagagggccaccatcaactgcaagtccagccagagtgttttatccagctccaacaataagaactacttagcttggtaccaacagaaaccaggacagcctcctaacctgctcatttactggacttctacccgagattccggggtccctgaccgattcagtggcagcgggtctgggacagatttcactctcaccatcaacagcctgcaggctgaagatgtggctgtttattactgtcagcaatattatcgtactccgtggacgttcggccaagggaccaaggtggaaatcaaacga

SEQ ID NO: 1578 - DNA, 342 bp, synthetic construct
  misc_feature 1..342: note = source = /note="Description of Artificial Sequence: Synthetic polynucleotide"
  source 1..342: mol_type = other DNA
gacatcgtgatgacccagtctccagactccctgtctgtgtctctgggcgagagggccaccatcaactgcaagtccagccagagtgttttatccagctccaacaataagaactacttagcttggtaccagcagaaaccaggacagcctcctaacctgctcatttactggacttctacccgagattccggggtccctgaccgattcagtggcagcgggtctgggacagatttcactctcaccatcaacagcctgcaggctgaagatgtggctgtttattactgtcagcaatattatcgtactccgtggacgttcggccaagggaccaaggtggaaatcaaacga

SEQ ID NO: 1579 - DNA, 327 bp, synthetic construct
  misc_feature 1..327: note = source = /note="Description of Artificial Sequence: Synthetic polynucleotide"
  source 1..327: mol_type = other DNA
gaaattgtgttgacgcagtctccaggcaccctgtctttgtctccaggggaaagagccaccctctcctgcagggccagtcagagtattagttacagttacttagcctggtaccagcagaaacctggccaggctccccggctcctcatctatggtgcatccagcagggccactggcatcccagacaggttcagtggcagtgggtctgggacagacttcactctcaccatcagcagacaggagcctgatgattttgcagtgtattactgtcagcagtatggtagttcaccgctcactttcggcggagggaccaaggtggagatcaaacga

SEQ ID NO: 1580 - DNA, 324 bp, synthetic construct
  misc_feature 1..324: note = source = /note="Description of Artificial Sequence: Synthetic polynucleotide"
  source 1..324: mol_type = other DNA
gaaatagtgatgacgcagtctccagccaccctgtctgtgtctccaggggaaagagccaccctctcctgcagggccagtcagagtgttagcagcaacttagcctggtaccagcagaaacctggccaggctcccaggctcctcatctatggtgcagccaccagggccactggtatcccagccagggtcagtggcagtgggtctgggacagagttcactctcaccatcagcagcctgcagtctgaagattttgcagtttattactgtcagcagtataataactggcctctcactttcggcggagggaccaaggtggagatcaaacga

SEQ ID NO: 1581 - DNA, 324 bp, synthetic construct
  misc_feature 1..324: note = source = /note="Description of Artificial Sequence: Synthetic polynucleotide"
  source 1..324: mol_type = other DNA
gacattcagatgacccagtctccatcctccctgtctgcatctgtaggagacagagtcaccatcacttgccgggcaagtcagggcattagaaatgagttaggctggtatcagcagaaaccagggaaagcccctaaacgcctgatctatggtgcatccagtttgcaaagtggggtcccatcaaggttcagcggcagtggatctgggacagagttcactctcacaatcagcagcctgcagcctgaagattttgtaacttattactgtctacagcataatagttacccattcactttcggccctgggaccaaagtggatgtcaaacga

SEQ ID NO: 1582 - DNA, 321 bp, synthetic construct
  misc_feature 1..321: note = source = /note="Description of Artificial Sequence: Synthetic polynucleotide"
  source 1..321: mol_type = other DNA
gacatccagatgacccagtctccatcctccctgtctgcatctgtgggggacagagtcaccatcacttgccaggcgagtcaggacattaccaactatttaaattggtatcagcagaaaccagggaaagcccctaaactcctgatctacgatgcttccaatttggagccaggggtcccatcaaggttcagtggaagtggatctgggacagattttactttcaccatcagcagcctgcagcctgaagatattgcaacatattactgtcaacagtatgatgatctattcactttcggccctgggaccaaagtggatatcaaacga

SEQ ID NO: 1583 - DNA, 324 bp, synthetic construct
  misc_feature 1..324: note = source = /note="Description of Artificial Sequence: Synthetic polynucleotide"
  source 1..324: mol_type = other DNA
gacatccagatgacccagtctccatcttccgtgtctgcatctgtaggagacagagtcaccatcacttgtcgggcgagtcagggtcttatcatctggttagcctggtatcagcagaaaccggggaaagcccctaaactcctgatctatgctgcatccagtttgcaaagtggggtcccatcaaggttcagcggcagtggctctgggacagatttcactctcaccatcagcagcctacagcctgaagattttgcaacttactattgtcaacagactaacagtttccctccgacgttcggccaagggaccaaggtggaaatcaaacga

SEQ ID NO: 1584 - DNA, 324 bp, synthetic construct; identical to SEQ ID NO: 1583
  misc_feature 1..324: note = source = /note="Description of Artificial Sequence: Synthetic polynucleotide"
  source 1..324: mol_type = other DNA

SEQ ID NO: 1585 - DNA, 324 bp, synthetic construct
  misc_feature 1..324: note = source = /note="Description of Artificial Sequence: Synthetic polynucleotide"
  source 1..324: mol_type = other DNA
gacattcagatgacccagtctccatcctccctgtctgcatctgtaggagacagagtcaccatcacttgccgggcaagtcagggcattagaaatgagttaggctggtatcagcagaaaccagggaaagcccctaaactcctgatctatggtgcatccagtttgcaaagtggggtcccatcaaggttcagcggcagtggatctgggacagagttcactctcacaatcagcagcctgcagcctgaagattttgtaacttattactgtctacagcataatagttacccattcactttcggccaagggaccaaagtggatgtcaaacga

SEQ ID NO: 1586 - DNA, 324 bp, synthetic construct; identical to SEQ ID NO: 1585
  misc_feature 1..324: note = source = /note="Description of Artificial Sequence: Synthetic polynucleotide"
  source 1..324: mol_type = other DNA

SEQ ID NO: 1587 - DNA, 324 bp, synthetic construct; identical to SEQ ID NO: 1585
  misc_feature 1..324: note = source = /note="Description of Artificial Sequence: Synthetic polynucleotide"
  source 1..324: mol_type = other DNA

SEQ ID NO: 1588 - DNA, 324 bp, synthetic construct
  misc_feature 1..324: note = source = /note="Description of Artificial Sequence: Synthetic polynucleotide"
  source 1..324: mol_type = other DNA
gacattcagatgacccagtctccatcctccctgtctgcatctgtaggagacagagtcaccatcacttgccgggcaagtcagggcattagaaatgagttaggctggtatcagcagaaaccagggaaagcccctaaactcctgatctatggtgcatccagtttgcaaagtggggtcccatcaaggttcagcggcagtggatctgggacagagttcactctcacaatcagcagcctgcagcctgaagattttgtaacttattactgtctacagcataatagttacccattcactttcggccctgggaccaaagtggatgtcaaacga

SEQ ID NO: 1589 - DNA, 324 bp, synthetic construct
  misc_feature 1..324: note = source = /note="Description of Artificial Sequence: Synthetic polynucleotide"
  source 1..324: mol_type = other DNA
gacattcagatgacccagtctccatcctccctgtctgcatctgtaggagacagagtcaccatcacttgccgggcaagtcagggcattagaaatgagttaggctggtatcagcagaaaccagggaaagcccctaaacgcctgatctatggtgcatccagtttgcaaagtggggtcccatcaaggttcagcggcagtggatctgggacagagttcactctcacaatcagcagcctgcagcctgaagattttgtaacttattactgtctacagcataatagttacccattcactttcggccaagggaccaaagtggatgtcaaacga

SEQ ID NO: 1590 - DNA, 324 bp, synthetic construct; identical to SEQ ID NO: 1585
  misc_feature 1..324: note = source = /note="Description of Artificial Sequence: Synthetic polynucleotide"
  source 1..324: mol_type = other DNA

SEQ ID NO: 1591 - DNA, 324 bp, synthetic construct
  misc_feature 1..324: note = source = /note="Description of Artificial Sequence: Synthetic polynucleotide"
  source 1..324: mol_type = other DNA
gacatccagatgacccagtctccatcctccctgtctgcatctataggagacagagtcaccatcacttgccgggcaagtcaggacattagagattatttaggctggtatcagcagaaaccagggaaagcccctaagctcctgatctatggtgcatccagtttgcaaagtggggtcccttcaaggttcagcggcagtggatctgggacagaattcactctcacaatcagcagcctgcagcctgaagatttcgcaacttattactgtctacagcataataattaccccttcactttcggccaagggaccaaagtggatatcaaacga

SEQ ID NO: 1592 - DNA, 324 bp, synthetic construct
  misc_feature 1..324: note = source = /note="Description of Artificial Sequence: Synthetic polynucleotide"
  source 1..324: mol_type = other DNA
gacatccagatgacccagtctccatcctccctgtctgcatctataggagacagagtcaccatcacttgccgggcaagtcaggacattagagattatttaggctggtatcagcagaaaccagggaaagcccctaagcgcctgatctatggtgcatccagtttgcaaagtggggtcccttcaaggttcagcggcagtggatctgggacagaattcactctcacaatcagcagcctgcagcctgaagatttcgcaacttattactgtctacagcataataattaccccttcactttcggccaagggaccaaagtggatatcaaacga

SEQ ID NO: 1593 - DNA, 324 bp, synthetic construct
  misc_feature 1..324: note = source = /note="Description of Artificial Sequence: Synthetic polynucleotide"
  source 1..324: mol_type = other DNA
gacatccagatgacccagtctccatcctccctgtctgcatctataggagacagagtcaccatcacttgccgggcaagtcaggacattagagattatttaggctggtatcagcagaaaccagggaaagcccctaagctcctgatctatggtgcatccagtttgcaaagtggggtcccttcaaggttcagcggcagtggatctgggacagaattcactctcacaatcagcagcctgcagcctgaagatttcgcaacttattactgtctacagcataataattaccccttcactttcggccctgggaccaaagtggatatcaaacga

SEQ ID NO: 1594 - DNA, 324 bp, synthetic construct; identical to SEQ ID NO: 1591
  misc_feature 1..324: note = source = /note="Description of Artificial Sequence: Synthetic polynucleotide"
  source 1..324: mol_type = other DNA

SEQ ID NO: 1595 - DNA, 324 bp, synthetic construct; identical to SEQ ID NO: 1591
  misc_feature 1..324: note = source = /note="Description of Artificial Sequence: Synthetic polynucleotide"
  source 1..324: mol_type = other DNA

SEQ ID NO: 1596 - DNA, 324 bp, synthetic construct; identical to SEQ ID NO: 1591
  misc_feature 1..324: note = source = /note="Description of Artificial Sequence: Synthetic polynucleotide"
  source 1..324: mol_type = other DNA

SEQ ID NO: 1597 - DNA, 324 bp, synthetic construct; identical to SEQ ID NO: 1591
  misc_feature 1..324: note = source = /note="Description of Artificial Sequence: Synthetic polynucleotide"
  source 1..324: mol_type = other DNA

SEQ ID NO: 1598 - DNA, 324 bp, synthetic construct
  misc_feature 1..324: note = source = /note="Description of Artificial Sequence: Synthetic polynucleotide"
  source 1..324: mol_type = other DNA
gacatccagatgacccagtctccatcctccctgtctgcatctataggagacagagtcaccatcacttgccgggcaagtcaggaccttagaaattatttaggctggtatcaccagaaaccagggaaagcccctaagcgcctgatctatggtgcatccagtttgcaaagtggggtcccttcaaggttcagcggcagtggatctgggacagaattcactctcacaatcagcagcctgcagcctgaagatttcgcaacttattactgtctacagcataataattaccccttcactttcggccctgggaccaaagtggatatcaaacga

SEQ ID NO: 1599 - DNA, 324 bp, synthetic construct
  misc_feature 1..324: note = source = /note="Description of Artificial Sequence: Synthetic polynucleotide"
  source 1..324: mol_type = other DNA
gacatccagatgacccagtctccatcctccctgtctgcatctataggagacagagtcaccatcacttgccgggcaagtcaggaccttagaaattatttaggctggtatcaacagaaaccagggaaagcccctaagctcctgatctatggtgcatccagtttgcaaagtggggtcccttcaaggttcagcggcagtggatctgggacagaattcactctcacaatcagcagcctgcagcctgaagatttcgcaacttattactgtctacagcataataattaccccttcactttcggccctgggaccaaagtggatatcaaacga

SEQ ID NO: 1600 - DNA, 324 bp, synthetic construct; identical to SEQ ID NO: 1599
  misc_feature 1..324: note = source = /note="Description of Artificial Sequence: Synthetic polynucleotide"
  source 1..324: mol_type = other DNA

SEQ ID NO: 1601 - DNA, 324 bp, synthetic construct
  misc_feature 1..324: note = source = /note="Description of Artificial Sequence: Synthetic polynucleotide"
  source 1..324: mol_type = other DNA
gacatccagatgacccagtctccatcctccctgtctgcatctataggagacagagtcaccatcacttgccgggcaagtcaggaccttagaaattatttaggctggtatcaccagaaaccagggaaagcccctaagctcctgatctatggtgcatccagtttgcaaagtggggtcccttcaaggttcagcggcagtggatctgggacagaattcactctcacaatcagcagcctgcagcctgaagatttcgcaacttattactgtctacagcataataattaccccttcactttcggccctgggaccaaagtggatatcaaacga

SEQ ID NO: 1602 - DNA, 324 bp, synthetic construct
  misc_feature 1..324: note = source = /note="Description of Artificial Sequence: Synthetic polynucleotide"
  source 1..324: mol_type = other DNA
gacatccagatgacccagtctccatcctccctgtctgcatctataggagacagagtcaccatcacttgccgggcaagtcaggaccttagaaattatttaggctggtatcaacagaaaccagggaaagcccctaagcgcctgatctatggtgcatccagtttgcaaagtggggtcccttcaaggttcagcggcagtggatctgggacagaattcactctcacaatcagcagcctgcagcctgaagatttcgcaacttattactgtctacagcataataattaccccttcactttcggccctgggaccaaagtggatatcaaacga

SEQ ID NO: 1603 - DNA, 324 bp, synthetic construct; identical to SEQ ID NO: 1602
  misc_feature 1..324: note = source = /note="Description of Artificial Sequence: Synthetic polynucleotide"
  source 1..324: mol_type = other DNA

SEQ ID NO: 1604 - DNA, 324 bp, synthetic construct; identical to SEQ ID NO: 1601
  misc_feature 1..324: note = source = /note="Description of Artificial Sequence: Synthetic polynucleotide"
  source 1..324: mol_type = other DNA

SEQ ID NO: 1605 - DNA, 324 bp, synthetic construct; identical to SEQ ID NO: 1598
  misc_feature 1..324: note = source = /note="Description of Artificial Sequence: Synthetic polynucleotide"
  source 1..324: mol_type = other DNA

SEQ ID NO: 1606 - DNA, 324 bp, synthetic construct; identical to SEQ ID NO: 1599
  misc_feature 1..324: note = source = /note="Description of Artificial Sequence: Synthetic polynucleotide"
  source 1..324: mol_type = other DNA

SEQ ID NO: 1607 - DNA, 324 bp, synthetic construct; identical to SEQ ID NO: 1599
  misc_feature 1..324: note = source = /note="Description of Artificial Sequence: Synthetic polynucleotide"
  source 1..324: mol_type = other DNA

SEQ ID NO: 1608 - DNA, 324 bp, synthetic construct
  misc_feature 1..324: note = source = /note="Description of Artificial Sequence: Synthetic polynucleotide"
  source 1..324: mol_type = other DNA
gacatccagatgacccagtctccatcctccctgtctgcatctataggagacagagtcaccatcacttgccgggcaagtcaggaccttagaaattatttaggctggtatcaacagaaaccagggaaagcccctaagctcctgatctatggtgcatccagtttgcaaagtggggtcccttcaaggttcagcggcagtggatctgggacagaattcactctcacaatcagcagcctgcagcctgaagatttcgcaacttattactgtctacagcataataattaccccttcactttcggccaagggaccaaagtggatatcaaacga

SEQ ID NO: 1609 - DNA, 324 bp, synthetic construct; identical to SEQ ID NO: 1599
  misc_feature 1..324: note = source = /note="Description of Artificial Sequence: Synthetic polynucleotide"
  source 1..324: mol_type = other DNA

SEQ ID NO: 1610 - DNA, 321 bp, synthetic construct
  misc_feature 1..321: note = source = /note="Description of Artificial Sequence: Synthetic polynucleotide"
  source 1..321: mol_type = other DNA
gacatccagatgacccagtctccatcctccctgtctgcatctgtaggagacagagtcaccatcacttgccaggcgagtcaggacattagcaactatttaaattggtatcagcagaaaccagggaaagcccctaagctcctgatctacgatgcatccaatttggaaacaggggtcccatcaaggttcagtggaagtggatctgggacagattttagtctcaccatcagcagcctgcagcctgaagattttgcaacatattactgtcaacagtatgatattctcctcactttcggcggagggaccaaggtggagatcaagcga

SEQ ID NO: 1611 - DNA, 321 bp, synthetic construct; identical to SEQ ID NO: 1610
  misc_feature 1..321: note = source = /note="Description of Artificial Sequence: Synthetic polynucleotide"
  source 1..321: mol_type = other DNA

SEQ ID NO: 1612 - DNA, 321 bp, synthetic construct
  misc_feature 1..321: note = source = /note="Description of Artificial Sequence: Synthetic polynucleotide"
  source 1..321: mol_type = other DNA
gacatccagatgacccagtctccatcctccctgtctgcatctgtaggagacagagtcaccatcacttgccaggcgagtcaggacattagcaactatttaaattggtatcagcagaaaccagggaaagcccctaagctcctgatctacgatgcatccaatttggaaacaggggtcccatcaaggttcagtggaagtggatctgggacagattttagtctcaccatcagcagcctgcagcctgaagatattgcaacatattactgtcaacagtatgatattctcctcactttcggcggagggaccaaggtggagatcaagcga

SEQ ID NO: 1613 - DNA, 321 bp, synthetic construct
  misc_feature 1..321: note = source = /note="Description of Artificial Sequence: Synthetic polynucleotide"
  source 1..321: mol_type = other DNA
gacatccagatgacccagtctccatcctccctgtctgcatctgtaggagacagagtcaccatcacttgccaggcgagtcaggacattagcaactatttaaattggtatcagcagaaaccagggaaagcccctaagctcctgatctacgatgcatccaatttggaaacaggggtcccatcaaggttcagtggaagtggatctgggacagattttagtttcaccatcagcagcctgcagcctgaagattttgcaacatattactgtcaacagtatgatattctcctcactttcggcggagggaccaaggtggagatcaagcga

SEQ ID NO: 1614 - DNA, 321 bp, synthetic construct; identical to SEQ ID NO: 1612
  misc_feature 1..321: note = source = /note="Description of Artificial Sequence: Synthetic polynucleotide"
  source 1..321: mol_type = other DNA

SEQ ID NO: 1615 - DNA, 321 bp, synthetic construct; identical to SEQ ID NO: 1613
  misc_feature 1..321: note = source = /note="Description of Artificial Sequence: Synthetic polynucleotide"
  source 1..321: mol_type = other DNA

SEQ ID NO: 1616 - DNA, 321 bp, synthetic construct; identical to SEQ ID NO: 1574
  misc_feature 1..321: note = source = /note="Description of Artificial Sequence: Synthetic polynucleotide"
  source 1..321: mol_type = other DNA

SEQ ID NO: 1617 - DNA, 321 bp, synthetic construct; identical to SEQ ID NO: 1610
  misc_feature 1..321: note = source = /note="Description of Artificial Sequence: Synthetic polynucleotide"
  source 1..321: mol_type = other DNA

SEQ ID NO: 1618 - DNA, 321 bp, synthetic construct; identical to SEQ ID NO: 1610
  misc_feature 1..321: note = source = /note="Description of Artificial Sequence: Synthetic polynucleotide"
  source 1..321: mol_type = other DNA

SEQ ID NO: 1619 - DNA, 324 bp, synthetic construct; identical to SEQ ID NO: 1572
  misc_feature 1..324: note = source = /note="Description of Artificial Sequence: Synthetic polynucleotide"
  source 1..324: mol_type = other DNA

SEQ ID NO: 1620 - DNA, 324 bp, synthetic construct; identical to SEQ ID NO: 1572
  misc_feature 1..324: note = source = /note="Description of Artificial Sequence: Synthetic polynucleotide"
  source 1..324: mol_type = other DNA

SEQ ID NO: 1621 - DNA, 324 bp, synthetic construct; identical to SEQ ID NO: 1591
  misc_feature 1..324: note = source = /note="Description of Artificial Sequence: Synthetic polynucleotide"
  source 1..324: mol_type = other DNA

SEQ ID NO: 1622 - DNA, 324 bp, synthetic construct; identical to SEQ ID NO: 1591
  misc_feature 1..324: note = source = /note="Description of Artificial Sequence: Synthetic polynucleotide"
  source 1..324: mol_type = other DNA

SEQ ID NO: 1623 - DNA, 324 bp, synthetic construct; identical to SEQ ID NO: 1593
  misc_feature 1..324: note = source = /note="Description of Artificial Sequence: Synthetic polynucleotide"
  source 1..324: mol_type = other DNA

SEQ ID NO: 1624 - DNA, 324 bp, synthetic construct; identical to SEQ ID NO: 1593
  misc_feature 1..324: note = source = /note="Description of Artificial Sequence: Synthetic polynucleotide"
  source 1..324: mol_type = other DNA

SEQ ID NO: 1625 - DNA, 324 bp, synthetic construct; identical to SEQ ID NO: 1593
  misc_feature 1..324: note = source = /note="Description of Artificial Sequence: Synthetic polynucleotide"
  source 1..324: mol_type = other DNA

SEQ ID NO: 1626 - DNA, 321 bp, synthetic construct
  misc_feature 1..321: note = source = /note="Description of Artificial Sequence: Synthetic polynucleotide"
  source 1..321: mol_type = other DNA
gacatccagatgacccagtctccatcctccctgtctgcatctgtgggggacagagtcaccatcacttgccaggcgagtcaggacattaccaactatttaaattggtatcagcagaaaccagggaaagcccctaaactcctgatctacgatgcttccaatttggagccaggggtcccatcaaggttcagtggaagtggatctgggacagattttactctcaccatcagcagcctgcagcctgaagattttgcaacatattactgtcaacagtatgatgatctattcactttcggccctgggaccaaagtggatatcaaacga

SEQ ID NO: 1627 - DNA, 321 bp, synthetic construct
  misc_feature 1..321: note = source = /note="Description of Artificial Sequence: Synthetic polynucleotide"
  source 1..321: mol_type = other DNA
gacatccagatgacccagtctccatcctccctgtctgcatctgtgggggacagagtcaccatcacttgccaggcgagtcaggacattaccaactatttaaattggtatcagcagaaaccagggaaagcccctaaactcctgatctacgatgcttccaatttggagccaggggtcccatcaaggttcagtggaagtggatctgggacagattttactctcaccatcagcagcctgcagcctgaagatattgcaacatattactgtcaacagtatgatgatctattcactttcggccctgggaccaaagtggatatcaaacga

SEQ ID NO: 1628 - DNA, 321 bp, synthetic construct; identical to SEQ ID NO: 1626
  misc_feature 1..321: note = source = /note="Description of Artificial Sequence: Synthetic polynucleotide"
  source 1..321: mol_type = other DNA

SEQ ID NO: 1629 - DNA, 321 bp, synthetic construct
  misc_feature 1..321: note = source = /note="Description of Artificial Sequence: Synthetic polynucleotide"
  source 1..321: mol_type = other DNA
gacatccagatgacccagtctccatcctccctgtctgcatctgtgggggacagagtcaccatcacttgccaggcgagtcaggacattaccaactatttaaattggtatcagcagaaaccagggaaagcccctaaactcctgatctacgatgcttccaatttggagccaggggtcccatcaaggttcagtggaagtggatctgggacagattttactttcaccatcagcagcctgcagcctgaagattttgcaacatattactgtcaacagtatgatgatctattcactttcggccctgggaccaaagtggatatcaaacga

SEQ ID NO: 1630 - DNA, 321 bp, synthetic construct; identical to SEQ ID NO: 1627
  misc_feature 1..321: note = source = /note="Description of Artificial Sequence: Synthetic polynucleotide"
  source 1..321: mol_type = other DNA

SEQ ID NO: 1631 - DNA, 321 bp, synthetic construct; identical to SEQ ID NO: 1629
  misc_feature 1..321: note = source = /note="Description of Artificial Sequence: Synthetic polynucleotide"
  source 1..321: mol_type = other DNA

SEQ ID NO: 1632 - DNA, 321 bp, synthetic construct; identical to SEQ ID NO: 1582
  misc_feature 1..321: note = source = /note="Description of Artificial Sequence: Synthetic polynucleotide"
  source 1..321: mol_type = other DNA

SEQ ID NO: 1633 - DNA, 321 bp, synthetic construct; identical to SEQ ID NO: 1626
  misc_feature 1..321: note = source = /note="Description of Artificial Sequence: Synthetic polynucleotide"
  source 1..321: mol_type = other DNA

SEQ ID NO: 1634 - DNA, 321 bp, synthetic construct; identical to SEQ ID NO: 1626
  misc_feature 1..321: note = source = /note="Description of Artificial Sequence: Synthetic polynucleotide"
  source 1..321: mol_type = other DNA

SEQ ID NO: 1635 - DNA, 321 bp, synthetic construct
  misc_feature 1..321: note = source = /note="Description of Artificial Sequence: Synthetic polynucleotide"
  source 1..321: mol_type = other DNA
gacatccagatgacccagtctccatcctccctgtctgcatctgtgggggacagagtcaccatcacttgccaggcgagtcaggacattaccaactatttaaattggtatcagcagaaaccagggaaagcccctaaactcctgatctacgatgcttccaatttggagccaggggtcccatcaaggttcagtggaagtggatctgggacagattttactctcaccatcagcagcctgcagcctgaagattttgcaacatattactgtcaacagtatgatgatctattcactttcggccaagggaccaaagtggatatcaaacga

SEQ ID NO: 1636 - DNA, 321 bp, synthetic construct; identical to SEQ ID NO: 1635
  misc_feature 1..321: note = source = /note="Description of Artificial Sequence: Synthetic polynucleotide"
  source 1..321: mol_type = other DNA

SEQ ID NO: 1637 - DNA, 324 bp, synthetic construct
  misc_feature 1..324: note = source = /note="Description of Artificial Sequence: Synthetic polynucleotide"
  source 1..324: mol_type = other DNA
gaaattgtgttgacgcagtctccaggcaccctgtctttgtctccaggggaaagagccaccctctcctgcagggccagtcagatttttaccagcacctacttagcctggtaccagcagaaacctggccaggctcccaggctcctcatctatggtgcatccagcagggccactggcatcccagacaggttcagtggcagtgggtctgggacagacttcactctcaccatcagcagattggagcctgaagattttgcagtgtattactgtcagcagtatggtagctcacctcgcttcggccaagggacacgactggagattaaacga

SEQ ID NO: 1638 - DNA, 324 bp, synthetic construct; identical to SEQ ID NO: 1637
  misc_feature 1..324: note = source = /note="Description of Artificial Sequence: Synthetic polynucleotide"
  source 1..324: mol_type = other DNA

SEQ ID NO: 1639 - DNA, 324 bp, synthetic construct; identical to SEQ ID NO: 1637
  misc_feature 1..324: note = source = /note="Description of Artificial Sequence: Synthetic polynucleotide"
  source 1..324: mol_type = other DNA

SEQ ID NO: 1640 - DNA, 324 bp, synthetic construct; identical to SEQ ID NO: 1637
  misc_feature 1..324: note = source = /note="Description of Artificial Sequence: Synthetic polynucleotide"
  source 1..324: mol_type = other DNA

SEQ ID NO: 1641 - DNA, 324 bp, synthetic construct
  misc_feature 1..324: note = source = /note="Description of Artificial Sequence: Synthetic polynucleotide"
  source 1..324: mol_type = other DNA
gaaatagtgatgacgcagtctccagccaccctgtctgtgtctccaggggaaagagccaccctctcctgcagggccagtcagagtgttagcagcaacttagcctggtaccagcagaaacctggccaggctcccaggctcctcatctatggtgcagccaccagggccactggtatcccagccaggttcagtggcagtgggtctgggacagagttcactctcaccatcagcagcctgcagtctgaagattttgcagtttattactgtcagcagtataataactggcctctcactttcggcggagggaccaaggtggagatcaaacga

SEQ ID NO: 1642 - DNA, 324 bp, synthetic construct; identical to SEQ ID NO: 1641
  misc_feature 1..324: note = source = /note="Description of Artificial Sequence: Synthetic polynucleotide"
  source 1..324: mol_type = other DNA

SEQ ID NO: 1643 - DNA, 324 bp, synthetic construct; identical to SEQ ID NO: 1641
  misc_feature 1..324: note = source = /note="Description of Artificial Sequence: Synthetic polynucleotide"
  source 1..324: mol_type = other DNA

SEQ ID NO: 1644 - DNA, 324 bp, synthetic construct; identical to SEQ ID NO: 1580
  misc_feature 1..324: note = source = /note="Description of Artificial Sequence: Synthetic polynucleotide"
  source 1..324: mol_type = other DNA

SEQ ID NO: 1645 - DNA, 324 bp, synthetic construct
  misc_feature 1..324: note = source = /note="Description of Artificial Sequence: Synthetic polynucleotide"
  source 1..324: mol_type = other DNA
gaaatagtgatgacgcagtctccagccaccctgtctgtgtctccaggggaaagagccaccctctcctgcagggccagtcagagtgttagcagcaacttagcctggtaccagcagaaacctggccaggctcccaggctcctcatctatggtgcagccaccagggccactggtatcccagccaggttcagtggcagtgggtctgggacagagttcactctcaccatcagcagcctggagcctgaagattttgcagtttattactgtcagcagtataataacttccctctcactttcggcggagggaccaaggtggagatcaaacga

SEQ ID NO: 1646 - DNA, 324 bp, synthetic construct
  misc_feature 1..324: note = source = /note="Description of Artificial Sequence: Synthetic polynucleotide"
  source 1..324: mol_type = other DNA
gaaatagtgatgacgcagtctccagccaccctgtctgtgtctccaggggaaagagccaccctctcctgcagggccagtcagagtgttagcagcaacttagcctggtaccagcagaaacctggccaggctcccaggctcctcatctatggtgcagccaccagggccactggtatcccagccaggttcagtggcagtgggtctgggacagagttcactctcaccatcagcagcctggagcctgaagattttgcagtttattactgtcagcagtataataactatcctctcactttcggcggagggaccaaggtggagatcaaacga

SEQ ID NO: 1647 - DNA, 324 bp, synthetic construct
  misc_feature 1..324: note = source = /note="Description of Artificial Sequence: Synthetic polynucleotide"
  source 1..324: mol_type = other DNA
gaaatagtgatgacgcagtctccagccaccctgtctgtgtctccaggggaaagagccaccctctcctgcagggccagtcagagtgttagcagcaacttagcctggtaccagcagaaacctggccaggctcccaggctcctcatctatggtgcagccaccagggccactggtatcccagccaggttcagtggcagtgggtctgggacagagttcactctcaccatcagcagcctggagcctgaagattttgcagtttattactgtcagcagtataataactggcctctcactttcggcggagggaccaaggtggagatcaaacga

SEQ ID NO: 1648 - DNA, 324 bp, synthetic construct; identical to SEQ ID NO: 1647
  misc_feature 1..324: note = source = /note="Description of Artificial Sequence: Synthetic polynucleotide"
  source 1..324: mol_type = other DNA

SEQ ID NO: 1649 - DNA, 327 bp, synthetic construct
  misc_feature 1..327: note = source = /note="Description of Artificial Sequence: Synthetic polynucleotide"
  source 1..327: mol_type = other DNA
gaaattgtgttgacgcagtctccaggcaccctgtctttgtctccaggggaaagagccaccctctcctgcagggccagtcagagtattagttacagttacttagcctggtaccagcagaaacctggccaggctccccggctcctcatctatggtgcatccagcagggccactggcatcccagacaggttcagtggcagtgggtctgggacagacttcactctcaccatcagcagactggagcctgatgattttgcagtgtattactgtcagcagtatggtagttcaccgctcactttcggcggagggaccaaggtggagatcaaacga

SEQ ID NO: 1650 - DNA, 327 bp, synthetic construct; identical to SEQ ID NO: 1579
  misc_feature 1..327: note = source = /note="Description of Artificial Sequence: Synthetic polynucleotide"
  source 1..327: mol_type = other DNA

SEQ ID NO: 1651 - DNA, 327 bp, synthetic construct; identical to SEQ ID NO: 1649
  misc_feature 1..327: note = source = /note="Description of Artificial Sequence: Synthetic polynucleotide"
  source 1..327: mol_type = other DNA

SEQ ID NO: 1652 - DNA, 327 bp, synthetic construct; identical to SEQ ID NO: 1649
  misc_feature 1..327: note = source = /note="Description of Artificial Sequence: Synthetic polynucleotide"
  source 1..327: mol_type = other DNA

SEQ ID NO: 1653 - DNA, 327 bp, synthetic construct; identical to SEQ ID NO: 1649
  misc_feature 1..327: note = source = /note="Description of Artificial Sequence: Synthetic polynucleotide"
  source 1..327: mol_type = other DNA

SEQ ID NO: 1654 - DNA, 327 bp, synthetic construct; identical to SEQ ID NO: 1579
  misc_feature 1..327: note = source = /note="Description of Artificial Sequence: Synthetic polynucleotide"
  source 1..327: mol_type = other DNA

SEQ ID NO: 1655 - DNA, 327 bp, synthetic construct; identical to SEQ ID NO: 1579
  misc_feature 1..327: note = source = /note="Description of Artificial Sequence: Synthetic polynucleotide"
  source 1..327: mol_type = other DNA

SEQ ID NO: 1656 - DNA, 342 bp, synthetic construct; identical to SEQ ID NO: 1575
  misc_feature 1..342: note = source = /note="Description of Artificial Sequence: Synthetic polynucleotide"
  source 1..342: mol_type = other DNA

SEQ ID NO: 1657 - DNA, 342 bp, synthetic construct; identical to SEQ ID NO: 1575
  misc_feature 1..342: note = source = /note="Description of Artificial Sequence: Synthetic polynucleotide"
  source 1..342: mol_type = other DNA

SEQ ID NO: 1658 - DNA, 342 bp, synthetic construct; identical to SEQ ID NO: 1575
  misc_feature 1..342: note = source = /note="Description of Artificial Sequence: Synthetic polynucleotide"
  source 1..342: mol_type = other DNA

SEQ ID NO: 1659 - DNA, 342 bp, synthetic construct; identical to SEQ ID NO: 1575
  misc_feature 1..342: note = source = /note="Description of Artificial Sequence: Synthetic polynucleotide"
  source 1..342: mol_type = other DNA

SEQ ID NO: 1660 - DNA, 342 bp, synthetic construct; identical to SEQ ID NO: 1575
  misc_feature 1..342: note = source = /note="Description of Artificial Sequence: Synthetic polynucleotide"
  source 1..342: mol_type = other DNA

SEQ ID NO: 1661 - DNA, 342 bp, synthetic construct; identical to SEQ ID NO: 1575
  misc_feature 1..342: note = source = /note="Description of Artificial Sequence: Synthetic polynucleotide"
  source 1..342: mol_type = other DNA

SEQ ID NO: 1662 - DNA, 342 bp, synthetic construct; identical to SEQ ID NO: 1575
  misc_feature 1..342: note = source = /note="Description of Artificial Sequence: Synthetic polynucleotide"
  source 1..342: mol_type = other DNA

SEQ ID NO: 1663 - DNA, 342 bp, synthetic construct; identical to SEQ ID NO: 1575
  misc_feature 1..342: note = source = /note="Description of Artificial Sequence: Synthetic polynucleotide"
  source 1..342: mol_type = other DNA

SEQ ID NO: 1664 - DNA, 342 bp, synthetic construct; identical to SEQ ID NO: 1575
  misc_feature 1..342: note = source = /note="Description of Artificial Sequence: Synthetic polynucleotide"
  source 1..342: mol_type = other DNA

SEQ ID NO: 1665 - DNA, 342 bp, synthetic construct
  misc_feature 1..342: note = source = /note="Description of Artificial Sequence: Synthetic polynucleotide"
  source 1..342: mol_type = other DNA
gacatcgtgatgacccagtctccagactccctggctgtgtctctgggcgagagggccaccatcaactgcaagtccagccagagtgttttatccagctccaacaataagaactacatagcttggtaccagcagaaaccaggacaacctcctaagctgctcatttactgggcatctacccgggaatccggggtccctgaccgattcagtggcagcgggtctgggacagatttcactctcaccatcagcagcctgcaggctgaagatgtggcagttttttactgtcaacaatattatagtactccgtggacgttcggccaagggaccaaggtggaaatcaaacga

SEQ ID NO: 1666 - DNA, 342 bp, synthetic construct; identical to SEQ ID NO: 1665
  misc_feature 1..342: note = source = /note="Description of Artificial Sequence: Synthetic polynucleotide"
  source 1..342: mol_type = other DNA

SEQ ID NO: 1667 - DNA, 342 bp, synthetic construct
  misc_feature 1..342: note = source = /note="Description of Artificial Sequence: Synthetic polynucleotide"
  source 1..342: mol_type = other DNA
gacatcgtgatgacccagtctccagactccctgtctgtgtctctgggcgagagggccaccatcaactgcaagtccagccagagtgttttatccagctccaacaataagaactacttagcttggtaccaacagaaaccaggacagcctcctaacctgctcatttactggacttctacccgagaatccggggtccctgaccgattcagtggcagcgggtctgggacagatttcactctcaccatcaacagcctgcaggctgaagatgtggctgtttattactgtcagcaatattatcgtactccgtggacgttcggccaagggaccaaggtggaaatcaaacga

SEQ ID NO: 1668 - DNA, 342 bp, synthetic construct; identical to SEQ ID NO: 1667
  misc_feature 1..342: note = source = /note="Description of Artificial Sequence: Synthetic polynucleotide"
  source 1..342: mol_type = other DNA

SEQ ID NO: 1669 - DNA, 342 bp, synthetic construct; identical to SEQ ID NO: 1577
  misc_feature 1..342: note = source = /note="Description of Artificial Sequence: Synthetic polynucleotide"
  source 1..342: mol_type = other DNA

SEQ ID NO: 1670 - DNA, 342 bp, synthetic construct; identical to SEQ ID NO: 1667
  misc_feature 1..342: note = source = /note="Description of Artificial Sequence: Synthetic polynucleotide"
  source 1..342: mol_type = other DNA

SEQ ID NO: 1671 - DNA, 342 bp, synthetic construct; identical to SEQ ID NO: 1667
  misc_feature 1..342: note = source = /note="Description of Artificial Sequence: Synthetic polynucleotide"
  source 1..342: mol_type = other DNA

SEQ ID NO: 1672 - DNA, 342 bp, synthetic construct; identical to SEQ ID NO: 1577
  misc_feature 1..342: note = source = /note="Description of Artificial Sequence: Synthetic polynucleotide"
  source 1..342: mol_type = other DNA

SEQ ID NO: 1673 - DNA, 342 bp, synthetic construct; identical to SEQ ID NO: 1577
  misc_feature 1..342: note = source = /note="Description of Artificial Sequence: Synthetic polynucleotide"
  source 1..342: mol_type = other DNA

SEQ ID NO: 1674 - DNA, 342 bp, synthetic construct
  misc_feature 1..342: note = source = /note="Description of Artificial Sequence: Synthetic polynucleotide"
  source 1..342: mol_type = other DNA
gacatcgtgatgacccagtctccagactccctggctgtgtctctgggcgagagggccaccatcaactgcaagtccagccagagtgttttatccagctccaacaataagaactacttagcttggtaccaacagaaaccaggacagcctcctaaactgctcatttactggacttctacccgagaatccggggtccctgaccgattcagtggcagcgggtctgggacagatttcactctcaccatcaacagcctgcaggctgaagatgtggctgtttattactgtcagcaatattatcgtactccgtggacgttcggccaagggaccaaggtggaaatcaaacga

SEQ ID NO: 1675 - DNA, 342 bp, synthetic construct; identical to SEQ ID NO: 1667
  misc_feature 1..342: note = source = /note="Description of Artificial Sequence: Synthetic polynucleotide"
  source 1..342: mol_type = other DNA

SEQ ID NO: 1676 - DNA, 342 bp, synthetic construct; identical to SEQ ID NO: 1576
  misc_feature 1..342: note = source = /note="Description of Artificial Sequence: Synthetic polynucleotide"
  source 1..342: mol_type = other DNA

SEQ ID NO: 1677 - DNA, 342 bp, synthetic construct; identical to SEQ ID NO: 1576
  misc_feature 1..342: note = source = /note="Description of Artificial Sequence: Synthetic polynucleotide"
  source 1..342: mol_type = other DNA

SEQ ID NO: 1678 - DNA, 342 bp, synthetic construct; identical to SEQ ID NO: 1576
  misc_feature 1..342: note = source = /note="Description of Artificial Sequence: Synthetic polynucleotide"
  source 1..342: mol_type = other DNA

SEQ ID NO: 1679 - DNA, 342 bp, synthetic construct; identical to SEQ ID NO: 1665
  misc_feature 1..342: note = source = /note="Description of Artificial Sequence: Synthetic polynucleotide"
  source 1..342: mol_type = other DNA

SEQ ID NO: 1680 - DNA, 342 bp, synthetic construct; identical to SEQ ID NO: 1665
  misc_feature 1..342: note = source = /note="Description of Artificial Sequence: Synthetic polynucleotide"
  source 1..342: mol_type = other DNA

SEQ ID NO: 1681 - DNA, 342 bp, synthetic construct; identical to SEQ ID NO: 1578
  misc_feature 1..342: note = source = /note="Description of Artificial Sequence: Synthetic polynucleotide"
  source 1..342: mol_type = other DNA

SEQ ID NO: 1682 - DNA, 342 bp, synthetic construct; identical to SEQ ID NO: 1578
  misc_feature 1..342: note = source = /note="Description of Artificial Sequence: Synthetic polynucleotide"
  source 1..342: mol_type = other DNA

SEQ ID NO: 1683 - DNA, 342 bp, synthetic construct; identical to SEQ ID NO: 1578
  misc_feature 1..342: note = source = /note="Description of Artificial Sequence: Synthetic polynucleotide"
  source 1..342: mol_type = other DNA

SEQ ID NO: 1684 - DNA, 342 bp, synthetic construct; identical to SEQ ID NO: 1578
  misc_feature 1..342: note = source = /note="Description of Artificial Sequence: Synthetic polynucleotide"
  source 1..342: mol_type = other DNA

SEQ ID NO: 1685 - DNA, 342 bp, synthetic construct; identical to SEQ ID NO: 1578
  misc_feature 1..342: note = source = /note="Description of Artificial Sequence: Synthetic polynucleotide"
  source 1..342: mol_type = other DNA

SEQ ID NO: 1686 - DNA, 342 bp, synthetic construct; identical to SEQ ID NO: 1578
  misc_feature 1..342: note = source = /note="Description of Artificial Sequence: Synthetic polynucleotide"
  source 1..342: mol_type = other DNA

SEQ ID NO: 1687 - DNA, 342 bp, synthetic construct; identical to SEQ ID NO: 1578
  misc_feature 1..342: note = source = /note="Description of Artificial Sequence: Synthetic polynucleotide"
  source 1..342: mol_type = other DNA

SEQ ID NO: 1688 - DNA, 342 bp, synthetic construct
  misc_feature 1..342: note = source = /note="Description of Artificial Sequence: Synthetic polynucleotide"
  source 1..342: mol_type = other DNA
gacatcgtgatgacccagtctccagactccctgtctgtgtctctgggcgagagggccaccatcaactgcaagtccagccagagtgttttatccagctccaacaataagaactacttagcttggtaccagcagaaaccaggacagcctcctaacctgctcatttactggacttctacccgagaatccggggtccctgaccgattcagtggcagcgggtctgggacagatttcactctcaccatcaacagcctgcaggctgaagatgtggctgtttattactgtcagcaatattatcgtactccgtggacgttcggccaagggaccaaggtggaaatcaaacga

SEQ ID NO: 1689 - DNA, 342 bp, synthetic construct; identical to SEQ ID NO: 1688
  misc_feature 1..342: note = source = /note="Description of Artificial Sequence: Synthetic polynucleotide"
  source 1..342: mol_type = other DNA

SEQ ID NO: 1690 - DNA, 342 bp, synthetic construct; identical to SEQ ID NO: 1688
  misc_feature 1..342: note = source = /note="Description of Artificial Sequence: Synthetic polynucleotide"
  source 1..342: mol_type = other DNA

SEQ ID NO: 1691 - DNA, 342 bp, synthetic construct; identical to SEQ ID NO: 1688
  misc_feature 1..342: note = source = /note="Description of Artificial Sequence: Synthetic polynucleotide"
  source 1..342: mol_type = other DNA

SEQ ID NO: 1692 - DNA, 342 bp, synthetic construct
  misc_feature 1..342: note = source = /note="Description of Artificial Sequence: Synthetic polynucleotide"
  source 1..342: mol_type = other DNA
gacatcgtgatgacccagtctccagactccctggctgtgtctctgggcgagagggccaccatcaactgcaagtccagccagagtgttttatccagctccaacaataagaactacttagcttggtaccagcagaaaccaggacagcctcctaaactgctcatttactggacttctacccgagattccggggtccctgaccgattcagtggcagcgggtctgggacagatttcactctcaccatcaacagcctgcaggctgaagatgtggctgtttattactgtcagcaatattatcgtactccgtggacgttcggccaagggaccaaggtggaaatcaaacga

SEQ ID NO: 1693 - DNA, 342 bp, synthetic construct
  misc_feature 1..342: note = source = /note="Description of Artificial Sequence: Synthetic polynucleotide"
  source 1..342: mol_type = other DNA
gacatcgtgatgacccagtctccagactccctggctgtgtctctgggcgagagggccaccatcaactgcaagtccagccagagtgttttatccagctccaacaataagaactacttagcttggtaccagcagaaaccaggacagcctcctaaactgctcatttactggacttctacccgagaatccggggtccctgaccgattcagtggcagcgggtctgggacagatttcactctcaccatcaacagcctgcaggctgaagatgtggctgtttattactgtcagcaatattatcgtactccgtggacgttcggccaagggaccaaggtggaaatcaaacga

SEQ ID NO: 1694 - DNA, 333 bp, synthetic construct
  misc_feature 1..333: note = source = /note="Description of Artificial Sequence: Synthetic polynucleotide"
  source 1..333: mol_type = other DNA
cagtctgtgctgactcagccaccctcagcgtctgggacccccgggcagagggtcaccatctcttgttctggaagtagctccaacatcggaagtcaaactgtaaactggtaccagcacctcccaggaacggcccccaaactcctcatctatactaataatcagcggccctcaggggtccctgaccgattctctggctccaagtctggcacctcagcctcccttgccatcagtgggctccagtctgaggatgaggctgattatttctgtgcaacattcgatgaaagcctgagtggtccggtattcggcggagggaccaagctgaccgtcctaggt

SEQ ID NO: 1695 - DNA, 333 bp, synthetic construct
  misc_feature 1..333: note = source = /note="Description of Artificial Sequence: Synthetic polynucleotide"
  source 1..333: mol_type = other DNA
cagtctgtgctgactcagccaccctcagcgtctgggacccccgggcagagggtcaccatctcttgttctggaagtagctccaacatcggaagtcaaactgtaaactggtaccagcacctcccaggaacggcccccaaactcctcatctatactaataatcagcggccctcaggggtccctgaccgattctctggctccaagtctggcacctcagcctcccttgccatcagtgggctccagtctgaggatgaggctgattatttctgtgcaacattcgatgaaagcctgcaaggtccggtattcggcggagggaccaagctgaccgtcctaggt

SEQ ID NO: 1696 - DNA, 333 bp, synthetic construct
  misc_feature 1..333: note = source = /note="Description of Artificial Sequence: Synthetic polynucleotide"
  source 1..333: mol_type = other DNA
cagtctgtgctgactcagccaccctcagcgtctgggacccccgggcagagggtcaccatctcttgttctggaagtagctccaacatcggaagtaattatgtaaactggtaccagcacctcccaggaacggcccccaaactcctcatctatactaataatcagcggccctcaggggtccctgaccgattctctggctccaagtctggcacctcagcctcccttgccatcagtgggctccagtctgaggatgaggctgattatttctgtgcaacattcgatgaaagcctgagtggtccggtattcggcggagggaccaagctgaccgtcctaggt

SEQ ID NO: 1697 - DNA, 333 bp, synthetic construct
  misc_feature 1..333: note = source = /note="Description of Artificial Sequence: Synthetic polynucleotide"
  source 1..333: mol_type = other DNA
cagtctgtgctgactcagccaccctcagcgtctgggacccccgggcagagggtcaccatctcttgttctggaagtagctccaacatcggaagtaattatgtaaactggtaccagcacctcccaggaacggcccccaaactcctcatctatactaataatcagcggccctcaggggtccctgaccgattctctggctccaagtctggcacctcagcctcccttgccatcagtgggctccagtctgaggatgaggctgattatttctgtgcaacattcgatgaaagcctgcaaggtccggtattcggcggagggaccaagctgaccgtcctaggt

SEQ ID NO: 1698 - DNA, 333 bp, synthetic construct
  misc_feature 1..333: note = source = /note="Description of Artificial Sequence: Synthetic polynucleotide"
  source 1..333: mol_type = other DNA
cagtctgtgctgactcagccaccctcagcgtctgggacccccgggcagagggtcaccatctcttgttctggaagtagctccaacatcggaagtcaaactgtaaactggtaccagcacctcccaggaacggcccccaaactcctcatctatactaataatcagcggccctcaggggtccctgaccgattctctggctccaagtctggcacctcagcctcccttgccatcagtgggctccagtctgaggatgaggctgattatttctgtgcaacattcgatgacagcctgaatggtccggtattcggcggagggaccaagctgaccgtcctaggt

SEQ ID NO: 1699 - DNA, 333 bp, synthetic construct
  misc_feature 1..333: note = source = /note="Description of Artificial Sequence: Synthetic polynucleotide"
  source 1..333: mol_type = other DNA
cagtctgtgctgactcagccaccctcagcgtctgggacccccgggcagagggtcaccatctcttgttctggaagtagctccaacatcggaagtaattatgtaaactggtaccagcacctcccaggaacggcccccaaactcctcatctatactaataatcagcggccctcaggggtccctgaccgattctctggctccaagtctggcacctcagcctcccttgccatcagtgggctccagtctgaggatgaggctgattatttctgtgcaacattcgatgacagcctgaatggtccggtattcggcggagggaccaagctgaccgtcctaggt

SEQ ID NO: 1700 - DNA, 333 bp, synthetic construct
  misc_feature 1..333: note = source = /note="Description of Artificial Sequence: Synthetic polynucleotide"
  source 1..333: mol_type = other DNA
cagtctgtgctgactcagccaccctcagcgtctgggacccccgggcagagggtcaccatctcttgttctggaagtagctccaacatcggaagtaatactgtaaactggtaccagcacctcccaggaacggcccccaaactcctcatctatactaataatcagcggccctcaggggtccctgaccgattctctggctccaagtctggcacctcagcctcccttgccatcagtgggctccagtctgaggatgaggctgattatttctgtgcaacattcgatgaaagcctgaatggtccggtattcggcggagggaccaagctgaccgtcctaggt

SEQ ID NO: 1701 - DNA, 333 bp, synthetic construct
  misc_feature 1..333: note = source = /note="Description of Artificial Sequence: Synthetic polynucleotide"
  source 1..333: mol_type = other DNA
cagtctgtgctgactcagccaccctcagcgtctgggacccccgggcagagggtcaccatctcttgttctggaagtagctccaacatcggaagtaatactgtaaactggtaccagcacctcccaggaacggcccccaaactcctcatctatactaataatcagcggccctcaggggtccctgaccgattctctggctccaagtctggcacctcagcctcccttgccatcagtgggctccagtctgaggatgaggctgattatttctgtgcaacattcgatgacagcctgcaaggtccggtattcggcggagggaccaagctgaccgtcctaggt

SEQ ID NO: 1702 - DNA, 333 bp, synthetic construct
  misc_feature 1..333: note = source = /note="Description of Artificial Sequence: Synthetic polynucleotide"
  source 1..333: mol_type = other DNA
cagtctgtgctgactcagccaccctcagcgtctgggacccccgggcagagggtcaccatctcttgttctggaagtagctccaacatcggaagtaatactgtaaactggtaccagcacctcccaggaacggcccccaaactcctcatctatactaataatcagcggccctcaggggtccctgaccgattctctggctccaagtctggcacctcagcctcccttgccatcagtgggctccagtctgaggatgaggctgattatttctgtgcaacattcgatgacagcctgagtggtccggtattcggcggagggaccaagctgaccgtcctaggt

SEQ ID NO: 1703 - DNA, 333 bp, synthetic construct
  misc_feature 1..333: note = source = /note="Description of Artificial Sequence: Synthetic polynucleotide"
  source 1..333: mol_type = other DNA
cagtctgtgctgactcagccaccctcagcgtctgggacccccgggcagagggtcaccatctcttgttctggaagtagctccaacatcggaagtaatactgtaaactggtaccagcacctcccaggaacggcccccaaactcctcatctatactaataatcagcggccctcaggggtccctgaccgattctctggctccaagtctggcacctcagcctcccttgccatcagtgggctccagtctgaggatgaggctgattatttctgtgcaacattcgatgacagcctgaatgctccggtattcggcggagggaccaagctgaccgtcctaggt

SEQ ID NO: 1704 - DNA, 333 bp, synthetic construct
  misc_feature 1..333: note = source = /note="Description of Artificial Sequence: Synthetic polynucleotide"
  source 1..333: mol_type = other DNA
cagtctgtgctgactcagccaccctcagcgtctgggacccccgggcagagggtcaccatctcttgttctggaagtagctccaacatcggaagtaatactgtaaactggtaccagcacctcccaggaacggcccccaaactcctcatctatactaataatcagcggccctcaggggtccctgaccgattctctggctccaagtctggcacctcagcctcccttgccatcagtgggctccagtctgaggatgaggctgattatttctgtgcaacattcgatagcagcctgaatggtccggtattcggcggagggaccaagctgaccgtcctaggt

SEQ ID NO: 1705 - DNA, 333 bp, synthetic construct
  misc_feature 1..333: note = source = /note="Description of Artificial Sequence: Synthetic polynucleotide"
  source 1..333: mol_type = other DNA
cagtctgtgctgactcagccaccctcagcgtctgggacccccgggcagagggtcaccatctcttgttctggaagtagctccaacatcggaagtaattatgtaaactggtaccagcacctcccaggaacggcccccaaactcctcatctatactaataatcagcggccctcaggggtccctgaccgattctctggctccaagtctggcacctcagcctcccttgccatcagtgggctccagtctgaggatgaggctgattatttctgtgcaacattcgatagcagcctgaatgctccggtattcggcggagggaccaagctgaccgtcctaggt

SEQ ID NO: 1706 - DNA, 333 bp, synthetic construct; identical to SEQ ID NO: 1705
  misc_feature 1..333: note = source = /note="Description of Artificial Sequence: Synthetic polynucleotide"
  source 1..333: mol_type = other DNA

SEQ ID NO: 1707 - DNA, 333 bp, synthetic construct; identical to SEQ ID NO: 1694
  misc_feature 1..333: note = source = /note="Description of Artificial Sequence: Synthetic polynucleotide"
  source 1..333: mol_type = other DNA

SEQ ID NO: 1708 - DNA, 324 bp, synthetic construct
  misc_feature 1..324: note = source = /note="Description of Artificial Sequence: Synthetic polynucleotide"
  source 1..324: mol_type = other DNA
gacatccagatgacccagtctccatcctccctgtctgcatctataggagacagagtcaccatcacttgccgggcaagtcaggaccttagaaattatttaggctggtatcaacagaaaccagggaaagcccctaagcgcctgatctatggtgcatccagtttgcaaagtggggtcccttcaaggttcagcggcagtggatctgggacagaattcactctcacaatcagcagcctgcagcctgaagatttcgcaacttattactgtctacagcataataattaccccttcactttcggccaagggaccaaagtggatatcaaacga

SEQ ID NO: 1709 - DNA, 324 bp, synthetic construct; identical to SEQ ID NO: 1592
  misc_feature 1..324: note = source = /note="Description of Artificial Sequence: Synthetic polynucleotide"
  source 1..324: mol_type = other DNA

SEQ ID NO: 1710 - DNA, 333 bp, synthetic construct
  misc_feature 1..333: note = source = /note="Description of Artificial Sequence: Synthetic polynucleotide"
  source 1..333: mol_type = other DNA
cagtctgtgctgactcagccaccctcagcgtctgggacccccgggcagagggtcaccatctcttgttctggaagtagctccaacatcggaagtaatactgtaaactggtaccagcaactcccaggaacggcccccaaactcctcatctatactaataatcagcggccctcaggggtccctgaccgattctctggctccaagtctggcacctcagcctcccttgccatcagtgggctccagtctgaggatgaggctgattatttctgtgcaacattcgatagcagcctgagtggtccggtattcggcggagggaccaagctgaccgtcctaggt

SEQ ID NO: 1711 - DNA, 324 bp, synthetic construct
  misc_feature 1..324: note = source = /note="Description of Artificial Sequence: Synthetic polynucleotide"
  source 1..324: mol_type = other DNA
gacatccagctgacccagtctccatcctccctgtctgcatctgtaggagacagagtcactatcacttgccgggcaagtcagaccattagcaggtttttaaattggtatcagcagaaacctgggaaagcccctgagctcctgatctatgttgcatccagtttgcaaagtggggtcccatcaagattcagtggcagtggttctgggacagatttcactctcaccatcagcagtctgcaacctgaagattttgcaacttactactgtcaacagagttacagtaccctgatcagttttggccaggggaccaagctggagatcacacga

SEQ ID NO: 1712 - DNA, 333 bp, synthetic construct
  misc_feature 1..333: note = source = /note="Description of Artificial Sequence: Synthetic polynucleotide"
  source 1..333: mol_type = other DNA
cagtctgtgttgacgcagccgccctcagtgtctgcggccccaggacagaaggtcaccatctcctgctctggaagcagctccaacattggaaataattatgtatcctggtatgagcagttcccaggaacagcccccaaactcctcatttatgacaataataagcgaccctcagggattcctgaccgattctctggctccaagtctggcacgtcagccaccctgggcatcaccggactccagactggggacgaggccgattattactgcggaacatgggatagcagcctgagtgctgtggtattcggcggagggaccaaactgaccgtcctaggt

SEQ ID NO: 1713 - DNA, 324 bp, synthetic construct
  misc_feature 1..324: note = source = /note="Description of Artificial Sequence: Synthetic polynucleotide"
  source 1..324: mol_type = other DNA
gacatccagctgacccagtctccatcctccctgtctgcatctgtaggagacagagtcactatcacttgccgggcaagtcagaccattagcaggtttttaaattggtatcagcagaaacctgggaaagcccctgagctcctgatctatgttgcatccagtttgcaaagtggggtcccatcaagattcagtggcagtggttctgggacagatttcactctcaccatcagcagtctgcaacctgaagattttgcaacttactactgtcaacagagttacagtaccctgatcagttttggccaggggaccaagctggagatcaaacga

SEQ ID NO: 1714 - DNA, 324 bp, synthetic construct; identical to SEQ ID NO: 1713
  misc_feature 1..324: note = source = /note="Description of Artificial Sequence: Synthetic polynucleotide"
  source 1..324: mol_type = other DNA

SEQ ID NO: 1715 - DNA, 324 bp, synthetic construct; identical to SEQ ID NO: 1711
  misc_feature 1..324: note = source = /note="Description of Artificial Sequence: Synthetic polynucleotide"
  source 1..324: mol_type = other DNA

SEQ ID NO: 1716 - DNA, 324 bp, synthetic construct
  misc_feature 1..324: note = source = /note="Description of Artificial Sequence: Synthetic polynucleotide"
  source 1..324: mol_type = other DNA
gacatccagctgacccagtctccatcctccctgtctgcatctgtaggagacagagtcactatcacttgccgggcaagtcagaccattagcaggtttttaaattggtatcagcagaaacctgggaaagcccctaagctcctgatctatgttgcatccagtttgcaaagtggggtcccatcaagattcagtggcagtggttctgggacagatttcactctcaccatcagcagtctgcaacctgaagattttgcaacttactactgtcaacagagttacagtaccctgatcagttttggccaggggaccaagctggagatcaaacga

SEQ ID NO: 1717 - DNA, 324 bp, synthetic construct; identical to SEQ ID NO: 1713
  misc_feature 1..324: note = source = /note="Description of Artificial Sequence: Synthetic polynucleotide"
  source 1..324: mol_type = other DNA

SEQ ID NO: 1718 - DNA, 324 bp, synthetic construct; identical to SEQ ID NO: 1713
  misc_feature 1..324: note = source = /note="Description of Artificial Sequence: Synthetic polynucleotide"
  source 1..324: mol_type = other DNA

SEQ ID NO: 1719 - DNA, 333 bp, synthetic construct
  misc_feature 1..333: note = source = /note="Description of Artificial Sequence: Synthetic polynucleotide"
  source 1..333: mol_type = other DNA
cagtctgtgttgacgcagccgccctcagtgtctgcggccccaggacagaaggtcaccatctcctgctctggaagcagctccaacattggaaataattatgtatcctggtatcagcagctcccaggaacagcccccaaactcctcatttatgacaataataagcgaccctcagggattcctgaccgattctctggctccaagtctggcacgtcagccaccctgggcatcaccggactccagactggggacgaggccgattattactgcggaacatgggatagcagcctgagtgctgtggtattcggcggagggaccaaactgaccgtcctaggt

SEQ ID NO: 1720 - DNA, 333 bp, synthetic construct; identical to SEQ ID NO: 1719
  misc_feature 1..333: note = source = /note="Description of Artificial Sequence: Synthetic polynucleotide"
  source 1..333: mol_type = other DNA

SEQ ID NO: 1721 - DNA, 333 bp, synthetic construct; identical to SEQ ID NO: 1712
  misc_feature 1..333: note = source = /note="Description of Artificial Sequence: Synthetic polynucleotide"
  source 1..333: mol_type = other DNA

SEQ ID NO: 1722 - DNA, 333 bp, synthetic construct
  misc_feature 1..333: note = source = /note="Description of Artificial Sequence: Synthetic polynucleotide"
  source 1..333: mol_type = other DNA
cagtctgtgttgacgcagccgccctcagtgtctgcggccccaggacagaaggtcaccatctcctgctctggaagcagctccaacattggaaataattatgtatcctggtatcagcagctcccaggaacagcccccaaactcctcatttatgacaataataagcgaccctcagggattcctgaccgattctctggctccaagtctggcacgtcagccaccctggccatcaccggactccagactggggacgaggccgattattactgcggaacattcgaaagcagcctgagtgctgtggtattcggcggagggaccaaactgaccgtcctaggt

SEQ ID NO: 1723 - DNA, 333 bp, synthetic construct
  misc_feature 1..333: note = source = /note="Description of Artificial Sequence: Synthetic polynucleotide"
  source 1..333: mol_type = other DNA
cagtctgtgttgacgcagccgccctcagtgtctgcggccccaggacagaaggtcaccatctcctgctctggaagcagctccaacattggaaataattatgtatcctggtatcagcagctcccaggaacagcccccaaactcctcatttatgacaataataagcgaccctcagggattcctgaccgattctctggctccaagtctggcacgtcagccaccctggccatcaccggactccagactggggacgaggccgattattactgcggaacatgggatagcagcctgagtgctgtggtattcggcggagggaccaaactgaccgtcctaggt

SEQ ID NO: 1724 - DNA, 333 bp, synthetic construct; identical to SEQ ID NO: 1723
  misc_feature 1..333: note = source = /note="Description of Artificial Sequence: Synthetic polynucleotide"
  source 1..333: mol_type = other DNA

SEQ ID NO: 1725 - DNA, 333 bp, synthetic construct; identical to SEQ ID NO: 1719
  misc_feature 1..333: note = source = /note="Description of Artificial Sequence: Synthetic polynucleotide"
  source 1..333: mol_type = other DNA

SEQ ID NO: 1726 - DNA, 333 bp, synthetic construct; identical to SEQ ID NO: 1722
  misc_feature 1..333: note = source = /note="Description of Artificial Sequence: Synthetic polynucleotide"
  source 1..333: mol_type = other DNA

SEQ ID NO: 1727 - DNA, 324 bp, synthetic construct
  misc_feature 1..324: note = source = /note="Description of Artificial Sequence: Synthetic polynucleotide"
  source 1..324: mol_type = other DNA
gacatccagctgacccagtctccatcctccctgtctgcatctgtaggagacagagtcactatcacttgccgggcaagtcagaccattagcaggtttttaaattggtatcagcagaaacctgggaaagcccctaagctcctgatctatgttgcatccagtttgcaaagtggggtcccatcaagattcagtggcagtggttctgggacagatttcactctcaccatcagcagtctgcaacctgaagattttgcaacttactactgtcaacagagttacagtaccctgctcagttttggccaggggaccaagctggagatcaaacga

SEQ ID NO: 1728 - DNA, 384 bp, synthetic construct
  misc_feature 1..384: note = source = /note="Description of Artificial Sequence: Synthetic polynucleotide"
  source 1..384: mol_type = other DNA
cagatgcaggtggtgcagtctggggctgaggtgaagaagcctggggcctcagtgaaggtctcctgcaaggcttccggatacaccttcaccggctactatatgcattgggtgcgacaggcccctggacaagggcttgagtggatgggatggatcaaccctaacagtggtggcacaaactatgcacagaagtttcagggcagggtcaccatgaccagggacacgtccatcagtacagcctacatggagctgagcaggctgaggtctgacgacacggccgtgtattactgtgcgagagggggggattacgtttgggggacttatcggcctcactactactacggtatggacgtctggggccaagggaccacggtcaccgtctcctca

SEQ ID NO: 1729 - DNA, 363 bp, synthetic construct
  misc_feature 1..363: note = source = /note="Description of Artificial Sequence: Synthetic polynucleotide"
  source 1..363: mol_type = other DNA
caggtgcagctggtggagtctgggggaggcgtggtccagcctgggaggtccctgagactctcctgtgcagcgtctggattcactttcagtaactttggcatgcactgggtccgccaggctccaggcaaggggctggagtgggtggcagttatatggtatgatggaagtaatgaaaactatgcagactccgtgaagggccgattcaccatctccagagacaattccaagaatacgctgtatctgcacatgaacagcctgagagtcgcggacacggctgtgtattattgtgcgcgagatgggacgatctttggagtggtcttgggggactactggggccagggaaccctggtcaccgtctcctca

SEQ ID NO: 1730 - DNA, 363 bp, synthetic construct
  misc_feature 1..363: note = source = /note="Description of Artificial Sequence: Synthetic polynucleotide"
  source 1..363: mol_type = other DNA
caggtgcagctggtggagtctgggggaggcgtggtccagcctgggaggtccctgagactctcctgtgcagcgtctggattcaccttcagttactttggcatgcactgggtccgccaggctccaggcaaggggctggagtgggtggcagttatatggtatgatggaagtaataaatactatgcagactccgtgaagggccgcttcaccatctccagagacaattccaagaacacgctgtatctgcaaatgaacagcctgagagccgaggacacggctgtgtattactgtgcgcgagatgggacgatttttggagtgctcttgggggactactggggccagggaaccctggtcaccgtctcctca

SEQ ID NO: 1731 - DNA, 360 bp, synthetic construct
  misc_feature 1..360: note = source = /note="Description of Artificial Sequence: Synthetic polynucleotide"
  source 1..360: mol_type = other DNA
caggtgcaactggtggagtctgggggaggcgtggtccagcctgggaggtccctgagactctcctgtgcagcgtctggattcaccttcagtagctatggcatgcactgggtccgccaggctccaggcaaggggctggagtgggtggcagttatatggtatgatggaagtaataaatactatgcagactccgtgaagggccgattcaccatctccagcgacaattccaagaacacgctgtatctgcaaatgaacagcctgagagccgaggacacggctgtgtattactgtgcgagagataggacgatttttggagtggttcttgactactggggccagggaaccctggtcaccgtctcctca

SEQ ID NO: 1732 - DNA, 369 bp, synthetic construct
  misc_feature 1..369: note = source = /note="Description of Artificial Sequence: Synthetic polynucleotide"
  source 1..369: mol_type = other DNA
caggtgccgctggtgcagtctggggctgaggtgaagaagcctggggcctcagtgaaggtctcctgcaaggcttctggatacaccttcaccggctactatatccactgggtgcgacaggcccctggacaagggcttgagtggatggggtggatcaaccctgacagtggtggcacagactattcacagaggtttcagggcaggttcaccatgaccagggacacgtccatcagcacagcctacatggaactgaacaggctgagatctgacgacacggccgtgtattactgtgcgagagaggccacgatttttggaatggttattgtaccgtttgactactggggccagggaaccctggtcaccgtctcctca

SEQ ID NO: 1733 - DNA, 369 bp, synthetic construct
  misc_feature 1..369: note = source = /note="Description of Artificial Sequence: Synthetic polynucleotide"
  source 1..369: mol_type = other DNA
caggtgccgctggtgcagtctggggctgaggtgaagaagcctggggcctcagtgaaggtctcctgcaaggcttctggatacaccttcaccggctactatatccactgggtgcgacaggcccctggacaaggacttgagtggatggggtggatcaaccctgacagtggtggcacagactattcacagaggtttcagggcaggttcaccatgaccagggacacgtccatcagcacagcctacatggaactgagcaggctgagatctgacgacacggccgtgtattactgtgcgagagaggccacgatttttggaatggttattgtaccgtttgactactggggccagggaaccctggtcaccgtctcctca

SEQ ID NO: 1734 - DNA, 369 bp, synthetic construct
  misc_feature 1..369: note = source = /note="Description of Artificial Sequence: Synthetic polynucleotide"
  source 1..369: mol_type = other DNA
caggtgccgctggtacagtctggggctgaggtgaagaagcctggggcctcagtgaaggtctcctgcaaggcttctggatacaccttcaccggctactatatacactgggtgcgtcaggcccctggacaagggcttgtgtggatggggtggatcagccctaacagtggtgacacaagctatgcacagaagtttcaggacagggtcaccatgaccagggacacgtccatcagcacagcctatatggagctgagcagactgagatctgacgacacggccgtgtatttctgtacgagagaggccacgatttttggaatgcttattgtaccatttgactactggggccagggaaccctggtcaccgtctcctca

SEQ ID NO: 1735 - DNA, 369 bp, synthetic construct
  misc_feature 1..369: note = source = /note="Description of Artificial Sequence: Synthetic polynucleotide"
  source 1..369: mol_type = other DNA
caggtgccgctggtgcagtctggggctgaggtgaagaagcctggggcctcagtgaaggtctcctgcaaggcttctggatacaccttcaccggctactatatacactgggtgcgtcaggcccctggacaagggcttgagtggatggggtggataagccctaacaatggtgacacaaactatgcacagaagtttcaggacagggtcaccatgaccagggacacgtccatcagcacagcctatatggagctgagcaggctgagatctgacgacacggccgtgtattactgtacgagagaggccacgatttttggaatgcttattgtaccatttgactactggggccagggaaccctggtcaccgtctcctca

SEQ ID NO: 1736 - DNA, 378 bp, synthetic construct
  misc_feature 1..378: note = source = /note="Description of Artificial Sequence: Synthetic polynucleotide"
  source 1..378: mol_type = other DNA
caggtgcagttgcaggagtcgggcccaggactggtgaagccttcacagaccctgtccctcacctgcactgtctctggtgactccatcagcagtggtggttactactggagctggatccgccagcacccagggaagggcctggagtggattgggtacatctattacagtgggagcacctactacaacccgtccctcaagagtcgagttaccatatcagtagacacgtctaagaaccagttctccctgaagctgagctctgtgactgccgcggacacggccgtgtattactgtgcgagagatcgtattacgatttttggagtggttatggggggcggtatggacgtctggggccaagggaccacggtcaccgtctcctca

SEQ ID NO: 1737 - DNA, 360 bp, synthetic construct
  misc_feature 1..360: note = source = /note="Description of Artificial Sequence: Synthetic polynucleotide"
  source 1..360: mol_type = other DNA
caggtgcagctggtggagtctgggggaggcgtggtccagcctgggaggtccctgagactctcctgtgcagcatctggattcaccttcagtaactatggcatgcactgggtccgccaggctccaggcgaggggctggagtgggtggcagctatatggtttgatggaagtgataaatactatgcagactccgtgaagggccgattcaccatctccagagacaactccaagaacacgctgtatctgcaaatgaacagcctgagagccgaggacacggctgtgtattactgtgcgagagatcaggcgatttttggagtggtccccgactactggggccagggaaccctggtcaccgtctcctca

SEQ ID NO: 1738 - DNA, 363 bp, synthetic construct; identical to SEQ ID NO: 1730
  misc_feature 1..363: note = source = /note="Description of Artificial Sequence: Synthetic polynucleotide"
  source 1..363: mol_type = other DNA

SEQ ID NO: 1739 - DNA, 360 bp, synthetic construct
  misc_feature 1..360: note = source = /note="Description of Artificial Sequence: Synthetic polynucleotide"
  source 1..360: mol_type = other DNA
caggtgcagctggtggagtctgggggaggcgtggtccagcctgggaggtccctgagactctcctgtgcagcgtctggattctccttcagtagctatggcatgcactgggtccgccagcctccaggcaaggggctggagtgggtggcagctatatggtatgatggaaataataaatactatgcagactccgtgaagggccgattcaccatctccagagacagttccaagaacacgctgtatctgcaaatgaacagcctgagagccgaggacacggctgtgtattactgtgcgagagatcggacgatttttggagtggtccttgagtacctcggccagggaaccctggtcaccgtctcctca

SEQ ID NO: 1740 - DNA, 351 bp, synthetic construct
  misc_feature 1..351: note = source = /note="Description of Artificial Sequence: Synthetic polynucleotide"
  source 1..351: mol_type = other DNA
caggtgcagctgcaggagtcgggcccaggactggtgaagccttcggagaccctgtccctcacctgcactgtctctcagggctccatcagtagttactactggagctggatccggcagcccgccgggaagggactagagtggattggccgtatctataccagtgggagcaccaactacaacccctccctcaagagtcgagtcaccatgtcaatagacacgtccaagaaccagttctccctgaaactgaactctgtgaccgccgcggacacggccgtgtattactgtgcgagagatgtagcagtggctggctttgactactggggccagggaaccctggtcaccgtctcctca

SEQ ID NO: 1741 - DNA, 351 bp, synthetic construct
  misc_feature 1..351: note = source = /note="Description of Artificial Sequence: Synthetic polynucleotide"
  source 1..351: mol_type = other DNA
caggtgcagctgcaggagtcgggcccaggactggtgaagccttcggagaccctgtccctcacctgcactgtctctgggggctccatcagtagttactactggagctggatccggcagcccgccgggaagggactagagtggattggccgtatctataccagtgggagcaccaactacaacccctccctcaagagtcgagtcaccatgtcaatagacacgtccaagaaccagttctccctgaaactgaactctgtgaccgccgcggacacggccgtgtattactgtgcgagagatgtagcagtggctggctttgactactggggccagggaaccctggtcaccgtctcctca

SEQ ID NO: 1742 - DNA, 363 bp, synthetic construct
  misc_feature 1..363: note = source = /note="Description of Artificial Sequence: Synthetic polynucleotide"
  source 1..363: mol_type = other DNA
caggtgcagctggtggagtctgggggaggcgtggtccagcctgggaggtccctgagactctcctgtgcagcgtctggattcaccttcagttactttggcatgcactgggtccgccaggctccaggcaaggggctggagtgggtggcagttatatggtatgatgcaagtaataaatactatgcagacgccgtgaagggccgcttcaccatctccagagacaattccaagaacacgctgtatctgcaaatgaacagcctgagagccgaggacacggctgtgtattactgtgcgcgagatgggacgatttttggagtgctcttgggggactactggggccagggaaccctggtcaccgtctcctca

SEQ ID NO: 1743 - DNA, 363 bp, synthetic construct
  misc_feature 1..363: note = source = /note="Description of Artificial Sequence: Synthetic polynucleotide"
  source 1..363: mol_type = other DNA
caggtgcagctggtggagtctgggggaggcgtggtccagcctgggaggtccctgagactctcctgtgcagcgtctggattcaccttcagttactttggcatgcactgggtccgccaggctccaggcaaggggctggagtgggtggcagttatatggtatgatgcaagtaataaatactatgcagactccgtgaagggccgcttcaccatctccagagacaattccaagaacacgctgtatctgcaaatgaacagcctgagagccgaggacacggctgtgtattactgtgcgcgagatgggacgatttttggagtgctcttgggggactactggggccagggaaccctggtcaccgtctcctca

SEQ ID NO: 1744 - DNA, 363 bp, synthetic construct
  misc_feature 1..363: note = source = /note="Description of Artificial Sequence: Synthetic polynucleotide"
  source 1..363: mol_type = other DNA
caggtgcagctggtggagtctgggggaggcgtggtccagcctgggaggtccctgagactctcctgtgcagcgtctggattcaccttcagttactttggcatgcactgggtccgccaggctccaggcaaggggctggagtgggtggcagttatatggtatgatggaagtaataaatactatgcagacgccgtgaagggccgcttcaccatctccagagacaattccaagaacacgctgtatctgcaaatgaacagcctgagagccgaggacacggctgtgtattactgtgcgcgagatgggacgatttttggagtgctcttgggggactactggggccagggaaccctggtcaccgtctcctca

SEQ ID NO: 1745 - DNA, 363 bp, synthetic construct; identical to SEQ ID NO: 1742
  misc_feature 1..363: note = source = /note="Description of Artificial Sequence: Synthetic polynucleotide"
  source 1..363: mol_type = other DNA

SEQ ID NO: 1746 - DNA, 363 bp, synthetic construct; identical to SEQ ID NO: 1742
  misc_feature 1..363: note = source = /note="Description of Artificial Sequence: Synthetic polynucleotide"
  source 1..363: mol_type = other DNA

SEQ ID NO: 1747 - DNA, 363 bp, synthetic construct
  misc_feature 1..363: note = source = /note="Description of Artificial Sequence: Synthetic polynucleotide"
  source 1..363: mol_type = other DNA
caggtgcagctggtggagtctgggggaggcgtggtccagcctgggaggtccctgagactctcctgtgcagcgtctggattcaccttcagttactttggcatgcactgggtccgccaggctccaggcaaggggctggagtgggtggcagttatatggtatgatgcaagtaataaatactatgcagacgccgtgaagggccgcttcaccatctccagagacaattccaagaacacgctgtatctgcaaatgaacagcctgagagccgaggacacggctgtgtattactgtgcgcgagataggacgatttttggagtgctcttgggggactactggggccagggaaccctggtcaccgtctcctca

SEQ ID NO: 1748 - DNA, 363 bp, synthetic construct
  misc_feature 1..363: note = source = /note="Description of Artificial Sequence: Synthetic polynucleotide"
  source 1..363: mol_type = other DNA
caggtgcagctggtggagtctgggggaggcgtggtccagcctgggaggtccctgagactctcctgtgcagcgtctggattcactttcagtaactttggcatgcactgggtccgccaggctccaggcaaggggctggagtgggtggcagttatatggtatgatgcaagtaatgaaaactatgcagacgccgtgaagggccgattcaccatctccagagacaattccaagaatacgctgtatctgcaaatgaacagcctgagagtcgcggacacggctgtgtattattgtgcgcgagatgggacgatctttggagtggtcttgggggactactggggccagggaaccctggtcaccgtctcctca

SEQ ID NO: 1749 - DNA, 363 bp, synthetic construct; identical to SEQ ID NO: 1748
  misc_feature 1..363: note = source = /note="Description of Artificial Sequence: Synthetic polynucleotide"
  source 1..363: mol_type = other DNA

SEQ ID NO: 1750 - DNA, 363 bp, synthetic construct; identical to SEQ ID NO: 1748
  misc_feature 1..363: note = source = /note="Description of Artificial Sequence: Synthetic polynucleotide"
  source 1..363: mol_type = other DNA

SEQ ID NO: 1751 - DNA, 363 bp, synthetic construct
  misc_feature 1..363: note = source = /note="Description of Artificial Sequence: Synthetic polynucleotide"
  source 1..363: mol_type = other DNA
caggtgcagctggtggagtctgggggaggcgtggtccagcctgggaggtccctgagactctcctgtgcagcgtctggattcactttcagtaactttggcatgcactgggtccgccaggctccaggcaaggggctggagtgggtggcagttatatggtatgatgcaagtaatgaaaactatgcagactccgtgaagggccgattcaccatctccagagacaattccaagaatacgctgtatctgcacatgaacagcctgagagtcgcggacacggctgtgtattattgtgcgcgagatgggacgatctttggagtggtcttgggggactactggggccagggaaccctggtcaccgtctcctca

SEQ ID NO: 1752 - DNA, 363 bp, synthetic construct
  misc_feature 1..363: note = source = /note="Description of Artificial Sequence: Synthetic polynucleotide"
  source 1..363: mol_type = other DNA
caggtgcagctggtggagtctgggggaggcgtggtccagcctgggaggtccctgagactctcctgtgcagcgtctggattcactttcagtaactttggcatgcactgggtccgccaggctccaggcaaggggctggagtgggtggcagttatatggtatgatggaagtaatgaaaactatgcagacgccgtgaagggccgattcaccatctccagagacaattccaagaatacgctgtatctgcacatgaacagcctgagagtcgcggacacggctgtgtattattgtgcgcgagatgggacgatctttggagtggtcttgggggactactggggccagggaaccctggtcaccgtctcctca

SEQ ID NO: 1753 - DNA, 363 bp, synthetic construct
  misc_feature 1..363: note = source = /note="Description of Artificial Sequence: Synthetic polynucleotide"
  source 1..363: mol_type = other DNA
caggtgcagctggtggagtctgggggaggcgtggtccagcctgggaggtccctgagactctcctgtgcagcgtctggattcactttcagtaactttggcatgcactgggtccgccaggctccaggcaaggggctggagtgggtggcagttatatggtatgatgcaagtaatgaaaactatgcagacgccgtgaagggccgattcaccatctccagagacaattccaagaatacgctgtatctgcaaatgaacagcctgagagtcgaggacacggctgtgtattattgtgcgcgagataggacgatctttggagtggtcttgggggactactggggccagggaaccctggtcaccgtctcctca

SEQ ID NO: 1754 - DNA, 363 bp, synthetic construct
  misc_feature 1..363: note = source = /note="Description of Artificial Sequence: Synthetic polynucleotide"
  source 1..363: mol_type = other DNA
caggtgcagctggtggagtctgggggaggcgtggtccagcctgggaggtccctgagactctcctgtgcagcgtctggattcactttcagtaactttggcatgcactgggtccgccaggctccaggcaaggggctggagtgggtggcagttatatggtatgatgcaagtaatgaaaactatgcagacgccgtgaagggccgattcaccatctccagagacaattccaagaatacgctgtatctgcaaatgaacagcctgagagtcgaggacacggctgtgtattattgtgcgcgagatgggacgatctttggagtggtcttgggggactactggggccagggaaccctggtcaccgtctcctca

SEQ ID NO: 1755 - DNA, 363 bp, synthetic construct
  misc_feature 1..363: note = source = /note="Description of Artificial Sequence: Synthetic polynucleotide"
  source 1..363: mol_type = other DNA
caggtgcagctggtggagtctgggggaggcgtggtccagcctgggaggtccctgagactctcctgtgcagcgtctggattcactttcagtaactttggcatgcactgggtccgccaggccccaggcaaggggctggagtgggtggcagttatatggtatgatggaagtaatgaaaactatgcagactccgtgaagggccgattcaccatctccagagacaattccaagaacacgctgtatctgcacatgaacagcctgagagccgcggacacggctgtgtattactgtgcgagagatgggacgatctttggagtggtcttgggggactactggggccagggaaccctggtcaccgtctcctca

SEQ ID NO: 1756 - DNA, 363 bp, synthetic construct
  misc_feature 1..363: note = source = /note="Description of Artificial Sequence: Synthetic polynucleotide"
  source 1..363: mol_type = other DNA
caggtgcagctggtggagtctgggggaggcgtggtccagcctgggaggtccctgagactctcctgtgcagcgtctggattcactttcagtaactttggcatgcactgggtccgccaggccccaggcaaggggctggagtgggtggcagttatatggtatgatgcaagtaatgaaaactatgcagacgccgtgaagggccgattcaccatctccagagacaattccaagaacacgctgtatctgcaaatgaacagcctgagagccgcggacacggctgtgtattactgtgcgagagatgggacgatctttggagtggtcttgggggactactggggccagggaaccctggtcaccgtctcctca

SEQ ID NO: 1757 - DNA, 363 bp, synthetic construct
  misc_feature 1..363: note = source = /note="Description of Artificial Sequence: Synthetic polynucleotide"
  source 1..363: mol_type = other DNA
caggtgcagctggtggagtctgggggaggcgtggtccagcctgggaggtccctgagactctcctgtgcagcgtctggattcactttcagtaactttggcatgcactgggtccgccaggccccaggcaaggggctggagtgggtggcagttatatggtatgatgcaagtaatgaaaactatgcagacgccgtgaagggccgattcaccatctccagagacaattccaagaacacgctgtatctgcacatgaacagcctgagagccgcggacacggctgtgtattactgtgcgagagatgggacgatctttggagtggtcttgggggactactggggccagggaaccctggtcaccgtctcctca

SEQ ID NO: 1758 - DNA, 363 bp, synthetic construct; identical to SEQ ID NO: 1756
  misc_feature 1..363: note = source = /note="Description of Artificial Sequence: Synthetic polynucleotide"
  source 1..363: mol_type = other DNA

SEQ ID NO: 1759 - DNA, 363 bp, synthetic construct; identical to SEQ ID NO: 1756
  misc_feature 1..363: note = source = /note="Description of Artificial Sequence: Synthetic polynucleotide"
  source 1..363: mol_type = other DNA

SEQ ID NO: 1760 - DNA, 363 bp, synthetic construct; identical to SEQ ID NO: 1757
  misc_feature 1..363: note = source = /note="Description of Artificial Sequence: Synthetic polynucleotide"
  source 1..363: mol_type = other DNA

SEQ ID NO: 1761 - DNA, 363 bp, synthetic construct; identical to SEQ ID NO: 1757
  misc_feature 1..363: note = source = /note="Description of Artificial Sequence: Synthetic polynucleotide"
  source 1..363: mol_type = other DNA

SEQ ID NO: 1762 - DNA, 363 bp, synthetic construct; identical to SEQ ID NO: 1756
  misc_feature 1..363: note = source = /note="Description of Artificial Sequence: Synthetic polynucleotide"
  source 1..363: mol_type = other DNA

SEQ ID NO: 1763 - DNA, 363 bp, synthetic construct
  misc_feature 1..363: note = source = /note="Description of Artificial Sequence: Synthetic polynucleotide"
  source 1..363: mol_type = other DNA
caggtgcagctggtggagtctgggggaggcgtggtccagcctgggaggtccctgagactctcctgtgcagcgtctggattcactttcagtaactttggcatgcactgggtccgccaggccccaggcaaggggctggagtgggtggcagttatatggtatgatggaagtaatgaaaactatgcagacgccgtgaagggccgattcaccatctccagagacaattccaagaacacgctgtatctgcaaatgaacagcctgagagccgcggacacggctgtgtattactgtgcgagagatgggacgatctttggagtggtcttgggggactactggggccagggaaccctggtcaccgtctcctca

SEQ ID NO: 1764 - DNA, 363 bp, synthetic construct
  misc_feature 1..363: note = source = /note="Description of Artificial Sequence: Synthetic polynucleotide"
  source 1..363: mol_type = other DNA
caggtgcagctggtggagtctgggggaggcgtggtccagcctgggaggtccctgagactctcctgtgcagcgtctggattcactttcagtaactttggcatgcactgggtccgccaggccccaggcaaggggctggagtgggtggcagttatatggtatgatgcaagtaatgaaaactatgcagactccgtgaagggccgattcaccatctccagagacaattccaagaacacgctgtatctgcaaatgaacagcctgagagccgcggacacggctgtgtattactgtgcgagagatgggacgatctttggagtggtcttgggggactactggggccagggaaccctggtcaccgtctcctca

SEQ ID NO: 1765 - DNA, 363 bp, synthetic construct
  misc_feature 1..363: note = source = /note="Description of Artificial Sequence: Synthetic polynucleotide"
  source 1..363: mol_type = other DNA
caggtgcagctggtggagtctgggggaggcgtggtccagcctgggaggtccctgagactctcctgtgcagcgtctggattcactttcagtaactttggcatgcactgggtccgccaggccccaggcaaggggctggagtgggtggcagttatatggtatgatgcaagtaatgaaaactatgcagacgccgtgaagggccgattcaccatctccagagacaattccaagaacacgctgtatctgcaaatgaacagcctgagagccgaggacacggctgtgtattactgtgcgagagataggacgatctttggagtggtcttgggggactactggggccagggaaccctggtcaccgtctcctca

SEQ ID NO: 1766 - DNA, 363 bp, synthetic construct
  misc_feature 1..363: note = source = /note="Description of Artificial Sequence: Synthetic polynucleotide"
  source 1..363: mol_type = other DNA
caggtgcagctggtggagtctgggggaggcgtggtccagcctgggaggtccctgagactctcctgtgcagcgtctggattcactttcagtaactttggcatgcactgggtccgccaggccccaggcaaggggctggagtgggtggcagttatatggtatgatgcaagtaatgaaaactatgcagacgccgtgaagggccgattcaccatctccagagacaattccaagaacacgctgtatctgcaaatgaacagcctgagagccgaggacacggctgtgtattactgtgcgagagatgggacgatctttggagtggtcttgggggactactggggccagggaaccctggtcaccgtctcctca

SEQ ID NO: 1767 - DNA, 360 bp, synthetic construct
  misc_feature 1..360: note = source = /note="Description of Artificial Sequence: Synthetic polynucleotide"
  source 1..360: mol_type = other DNA
caggtgcaactggtggagtctgggggaggcgtggtccagcctgggaggtccctgagactctcctgtgcagcgtctggattcaccttcagtagctatggcatgcactgggtccgccaggctccaggcaaggggctggagtgggtggcagttatatggtatgatgcaagtaataaatactatgcagacgccgtgaagggccgattcaccatctccagggacaattccaagaacacgctgtatctgcaaatgaacagcctgagagccgaggacacggctgtgtattactgtgcgagagataggacgatttttggagtggttcttgactactggggccagggaaccctggtcaccgtctcctca

SEQ ID NO: 1768 - DNA, 360 bp, synthetic construct
  misc_feature 1..360: note = source = /note="Description of Artificial Sequence: Synthetic polynucleotide"
  source 1..360: mol_type = other DNA
caggtgcaactggtggagtctgggggaggcgtggtccagcctgggaggtccctgagactctcctgtgcagcgtctggattcaccttcagtagctatggcatgcactgggtccgccaggctccaggcaaggggctggagtgggtggcagttatatggtatgatgcaagtaataaatactatgcagacgccgtgaagggccgattcaccatctccagcgacaattccaagaacacgctgtatctgcaaatgaacagcctgagagccgaggacacggctgtgtattactgtgcgagagataggacgatttttggagtggttcttgactactggggccagggaaccctggtcaccgtctcctca

SEQ ID NO: 1769 - DNA, 360 bp, synthetic construct; identical to SEQ ID NO: 1767
  misc_feature 1..360: note = source = /note="Description of Artificial Sequence: Synthetic polynucleotide"
  source 1..360: mol_type = other DNA

SEQ ID NO: 1770 - DNA, 360 bp, synthetic construct; identical to SEQ ID NO: 1767
  misc_feature 1..360: note = source = /note="Description of Artificial Sequence: Synthetic polynucleotide"
  source 1..360: mol_type = other DNA

SEQ ID NO: 1771 - DNA, 360 bp, synthetic construct; identical to SEQ ID NO: 1768
  misc_feature 1..360: note = source = /note="Description of Artificial Sequence: Synthetic polynucleotide"
  source 1..360: mol_type = other DNA

SEQ ID NO: 1772 - DNA, 360 bp, synthetic construct; identical to SEQ ID NO: 1768
  misc_feature 1..360: note = source = /note="Description of Artificial Sequence: Synthetic polynucleotide"
  source 1..360: mol_type = other DNA

SEQ ID NO: 1773 - DNA, 360 bp, synthetic construct; identical to SEQ ID NO: 1767
  misc_feature 1..360: note = source = /note="Description of Artificial Sequence: Synthetic polynucleotide"
  source 1..360: mol_type = other DNA

SEQ ID NO: 1774 - DNA, 360 bp, synthetic construct
  misc_feature 1..360: note = source = /note="Description of Artificial Sequence: Synthetic polynucleotide"
  source 1..360: mol_type = other DNA
caggtgcaactggtggagtctgggggaggcgtggtccagcctgggaggtccctgagactctcctgtgcagcgtctggattcaccttcagtagctatggcatgcactgggtccgccaggctccaggcaaggggctggagtgggtggcagttatatggtatgatgcaagtaataaatactatgcagactccgtgaagggccgattcaccatctccagggacaattccaagaacacgctgtatctgcaaatgaacagcctgagagccgaggacacggctgtgtattactgtgcgagagataggacgatttttggagtggttcttgactactggggccagggaaccctggtcaccgtctcctca

SEQ ID NO: 1775 - DNA, 360 bp, synthetic construct
  misc_feature 1..360: note = source = /note="Description of Artificial Sequence: Synthetic polynucleotide"
  source 1..360: mol_type = other DNA
caggtgcaactggtggagtctgggggaggcgtggtccagcctgggaggtccctgagactctcctgtgcagcgtctggattcaccttcagtagctatggcatgcactgggtccgccaggctccaggcaaggggctggagtgggtggcagttatatggtatgatggaagtaataaatactatgcagacgccgtgaagggccgattcaccatctccagggacaattccaagaacacgctgtatctgcaaatgaacagcctgagagccgaggacacggctgtgtattactgtgcgagagataggacgatttttggagtggttcttgactactggggccagggaaccctggtcaccgtctcctca

SEQ ID NO: 1776 - DNA, 363 bp, synthetic construct; identical to SEQ ID NO: 1742
  misc_feature 1..363: note = source = /note="Description of Artificial Sequence: Synthetic polynucleotide"
  source 1..363: mol_type = other DNA

SEQ ID NO: 1777 - DNA, 363 bp, synthetic construct; identical to SEQ ID NO: 1747
  misc_feature 1..363: note = source = /note="Description of Artificial Sequence: Synthetic polynucleotide"
  source 1..363: mol_type = other DNA

SEQ ID NO: 1778 - DNA, 363 bp, synthetic construct; identical to SEQ ID NO: 1742
  misc_feature 1..363: note = source = /note="Description of Artificial Sequence: Synthetic polynucleotide"
  source 1..363: mol_type = other DNA

SEQ ID NO: 1779 - DNA, 363 bp, synthetic construct; identical to SEQ ID NO: 1747
  misc_feature 1..363: note = source = /note="Description of Artificial Sequence: Synthetic polynucleotide"
  source 1..363: mol_type = other DNA

SEQ ID NO: 1780 - DNA, 363 bp, synthetic construct; identical to SEQ ID NO: 1730
  misc_feature 1..363: note = source = /note="Description of Artificial Sequence: Synthetic polynucleotide"
  source 1..363: mol_type = other DNA

SEQ ID NO: 1781 - DNA, 363 bp, synthetic construct; identical to SEQ ID NO: 1743
  misc_feature 1..363: note = source = /note="Description of Artificial Sequence: Synthetic polynucleotide"
  source 1..363: mol_type = other DNA

SEQ ID NO: 1782 - DNA, 363 bp, synthetic construct; identical to SEQ ID NO: 1744
  misc_feature 1..363: note = source = /note="Description of Artificial Sequence: Synthetic polynucleotide"
  source 1..363: mol_type = other DNA

SEQ ID NO: 1783 - DNA, 360 bp, synthetic construct
  misc_feature 1..360: note = source = /note="Description of Artificial Sequence: Synthetic polynucleotide"
  source 1..360: mol_type = other DNA
caggtgcagctggtggagtctgggggaggcgtggtccagcctgggaggtccctgagactctcctgtgcagcgtctggattctccttcagtagctatggcatgcactgggtccgccagcctccaggcaaggggctggagtgggtggcagctatatggtatgatgcaaataataaatactatgcagacgccgtgaagggccgattcaccatctccagagacagttccaagaacacgctgtatctgcaaatgaacagcctgagagccgaggacacggctgtgtattactgtgcgagagatcggacgatttttggagtggtccttgagtactggggccagggaaccctggtcaccgtctcctca

SEQ ID NO: 1784 - DNA, 360 bp, synthetic construct; identical to SEQ ID NO: 1783
  misc_feature 1..360: note = source = /note="Description of Artificial Sequence: Synthetic polynucleotide"
  source 1..360: mol_type = other DNA

SEQ ID NO: 1785 - DNA, 360 bp, synthetic construct
  misc_feature 1..360: note = source = /note="Description of Artificial Sequence: Synthetic polynucleotide"
  source 1..360: mol_type = other DNA
caggtgcagctggtggagtctgggggaggcgtggtccagcctgggaggtccctgagactctcctgtgcagcgtctggattctccttcagtagctatggcatgcactgggtccgccagcctccaggcaaggggctggagtgggtggcagctatatggtatgatgcaaataataaatactatgcagacgccgtgaagggccgattcaccatctccagagacagttccaagaacacgctgtatctgcaaatgaacagcctgagagccgaggacacggctgtgtattactgtgcgagagatcggacgatttttggagtggtccttgagtacctcggccagggaaccctggtcaccgtctcctca

SEQ ID NO: 1786 - DNA, 360 bp, synthetic construct; identical to SEQ ID NO: 1783
  misc_feature 1..360: note = source = /note="Description of Artificial Sequence: Synthetic polynucleotide"
  source 1..360: mol_type = other DNA

SEQ ID NO: 1787 - DNA, 360 bp, synthetic construct; identical to SEQ ID NO: 1785
  misc_feature 1..360: note = source = /note="Description of Artificial Sequence: Synthetic polynucleotide"
  source 1..360: mol_type = other DNA

SEQ ID NO: 1788 - DNA, 360 bp, synthetic construct; identical to SEQ ID NO: 1785
  misc_feature 1..360: note = source = /note="Description of Artificial Sequence: Synthetic polynucleotide"
  source 1..360: mol_type = other DNA

SEQ ID NO: 1789 - DNA, 360 bp, synthetic construct; identical to SEQ ID NO: 1783
  misc_feature 1..360: note = source = /note="Description of Artificial Sequence: Synthetic polynucleotide"
  source 1..360: mol_type = other DNA

SEQ ID NO: 1790 - DNA, 360 bp, synthetic construct
  misc_feature 1..360: note = source = /note="Description of Artificial Sequence: Synthetic polynucleotide"
  source 1..360: mol_type = other DNA
caggtgcagctggtggagtctgggggaggcgtggtccagcctgggaggtccctgagactctcctgtgcagcgtctggattctccttcagtagctatggcatgcactgggtccgccagcctccaggcaaggggctggagtgggtggcagctatatggtatgatggaaataataaatactatgcagacgccgtgaagggccgattcaccatctccagagacagttccaagaacacgctgtatctgcaaatgaacagcctgagagccgaggacacggctgtgtattactgtgcgagagatcggacgatttttggagtggtccttgagtactggggccagggaaccctggtcaccgtctcctca

SEQ ID NO: 1791 - DNA, 360 bp, synthetic construct
  misc_feature 1..360: note = source = /note="Description of Artificial Sequence: Synthetic polynucleotide"
  source 1..360: mol_type = other DNA
caggtgcagctggtggagtctgggggaggcgtggtccagcctgggaggtccctgagactctcctgtgcagcgtctggattctccttcagtagctatggcatgcactgggtccgccagcctccaggcaaggggctggagtgggtggcagctatatggtatgatgcaaataataaatactatgcagactccgtgaagggccgattcaccatctccagagacagttccaagaacacgctgtatctgcaaatgaacagcctgagagccgaggacacggctgtgtattactgtgcgagagatcggacgatttttggagtggtccttgagtactggggccagggaaccctggtcaccgtctcctca

SEQ ID NO: 1792 - DNA, 360 bp, synthetic construct; identical to SEQ ID NO: 1783
  misc_feature 1..360: note = source = /note="Description of Artificial Sequence: Synthetic polynucleotide"
  source 1..360: mol_type = other DNA

SEQ ID NO: 1793 - DNA, 360 bp, synthetic construct; identical to SEQ ID NO: 1785
  misc_feature 1..360: note = source = /note="Description of Artificial Sequence: Synthetic polynucleotide"
  source 1..360: mol_type = other DNA

SEQ ID NO: 1794 - DNA, 360 bp, synthetic construct
  misc_feature 1..360: note = source = /note="Description of Artificial Sequence: Synthetic polynucleotide"
  source 1..360: mol_type = other DNA
caggtgcagctggtggagtctgggggaggcgtggtccagcctgggaggtccctgagactctcctgtgcagcgtctggattcagtttcagtagctatggcatgcactgggtccgccaggctccaggcaagggactggagtgggtggcagttatatggtatgatgcaagtaataaatactatgaagacgccgtgaagggccgattcaccatctccagagacaattccaagaacacgctgtttctgcaagtgaacagcctgagagccgaggacacggctgtgtattactgtgcgagagggattacgatttttggtcatgggtttgaatattggggccagggaaccctggtcaccgtctcctca

SEQ ID NO: 1795 - DNA, 360 bp, synthetic construct
  misc_feature 1..360: note = source = /note="Description of Artificial Sequence: Synthetic polynucleotide"
  source 1..360: mol_type = other DNA
caggtgcagctggtggagtctgggggaggcgtggtccagcctgggaggtccctgagactctcctgtgcagcgtctggattcagtttcagtagctatggcatgcactgggtccgccaggctccaggcaagggactggagtgggtggcagttatatggtatgatggaagtaataaatactatgaagactccgtgaagggccgattcaccatctccagagacaattccaagaacacgctgtttctgcaagtgaacagcctgagagccgaggacacggctgtgtattactgtgcgagagggattacgatttttggtcatgggtttgaatattggggccagggaaccctggtcaccgtctcctca

SEQ ID NO: 1796 - DNA, 360 bp, synthetic construct
  misc_feature 1..360: note = source = /note="Description of Artificial Sequence: Synthetic polynucleotide"
  source 1..360: mol_type = other DNA
caggtgcagctggtggagtctgggggaggcgtggtccagcctgggaggtccctgagactctcctgtgcagcgtctggattcagtttcagtagctatggcatgcactgggtccgccaggctccaggcaagggactggagtgggtggcagttatatggtatgatggaagtaataaatactatgaagacgccgtgaagggccgattcaccatctccagagacaattccaagaacacgctgtttctgcaagtgaacagcctgagagccgaggacacggctgtgtattactgtgcgagagggattacgatttttggtcatgggtttgaatattggggccagggaaccctggtcaccgtctcctca

SEQ ID NO: 1797 - DNA, 360 bp, synthetic construct
  misc_feature 1..360: note = source = /note="Description of Artificial Sequence: Synthetic polynucleotide"
  source 1..360: mol_type = other DNA
caggtgcagctggtggagtctgggggaggcgtggtccagcctgggaggtccctgagactctcctgtgcagcgtctggattcagtttcagtagctatggcatgcactgggtccgccaggctccaggcaagggactggagtgggtggcagttatatggtatgatgcaagtaataaatactatgaagactccgtgaagggccgattcaccatctccagagacaattccaagaacacgctgtttctgcaagtgaacagcctgagagccgaggacacggctgtgtattactgtgcgagagggattacgatttttggtcatgggtttgaatattggggccagggaaccctggtcaccgtctcctca

SEQ ID NO: 1798 - DNA, 360 bp, synthetic construct
  misc_feature 1..360: note = source = /note="Description of Artificial Sequence: Synthetic polynucleotide"
  source 1..360: mol_type = other DNA
caggtgcagctggtggagtctgggggaggcgtggtccagcctgggaggtccctgagactctcctgtgcagcatctggattcaccttcagtaactatggcatgcactgggtccgccaggctccaggcgaggggctggagtgggtggcagctatatggtttgatgcaagtgataaatactatgcagacgccgtgaagggccgattcaccatctccagagacaactccaagaacacgctgtatctgcaaatgaacagcctgagagccgaggacacggctgtgtattactgtgcgagagatcaggcgatttttggagtggtccccgactactggggccagggaaccctggtcaccgtctcctca

SEQ ID NO: 1799 - DNA, 360 bp, synthetic construct
  misc_feature 1..360: note = source = /note="Description of Artificial Sequence: Synthetic polynucleotide"
  source 1..360: mol_type = other DNA
caggtgcagctggtggagtctgggggaggcgtggtccagcctgggaggtccctgagactctcctgtgcagcatctggattcaccttcagtaactatggcatgcactgggtccgccaggctccaggcgaggggctggagtgggtggcagctatatggtttgatgcaagtgataaatactatgcagactccgtgaagggccgattcaccatctccagagacaactccaagaacacgctgtatctgcaaatgaacagcctgagagccgaggacacggctgtgtattactgtgcgagagatcaggcgatttttggagtggtccccgactactggggccagggaaccctggtcaccgtctcctca

SEQ ID NO: 1800 - DNA, 360 bp, synthetic construct
  misc_feature 1..360: note = source = /note="Description of Artificial Sequence: Synthetic polynucleotide"
  source 1..360: mol_type = other DNA
caggtgcagctggtggagtctgggggaggcgtggtccagcctgggaggtccctgagactctcctgtgcagcatctggattcaccttcagtaactatggcatgcactgggtccgccaggctccaggcgaggggctggagtgggtggcagctatatggtttgatggaagtgataaatactatgcagacgccgtgaagggccgattcaccatctccagagacaactccaagaacacgctgtatctgcaaatgaacagcctgagagccgaggacacggctgtgtattactgtgcgagagatcaggcgatttttggagtggtccccgactactggggccagggaaccctggtcaccgtctcctca

SEQ ID NO: 1801 - DNA, 360 bp, synthetic construct; identical to SEQ ID NO: 1798
  misc_feature 1..360: note = source = /note="Description of Artificial Sequence: Synthetic polynucleotide"
  source 1..360: mol_type = other DNA

SEQ ID NO: 1802 - DNA, 360 bp, synthetic construct
  misc_feature 1..360: note = source = /note="Description of Artificial Sequence: Synthetic polynucleotide"
  source 1..360: mol_type = other DNA
caggtgcagctggtggagtctgggggaggcgtggtccagcctgggaggtccctgagactctcctgtgcagcatctggattcaccttcagtaactatggcatgcactgggtccgccaggctccaggcaaggggctggagtgggtggcagctatatggtttgatgcaagtgataaatactatgcagacgccgtgaagggccgattcaccatctccagagacaactccaagaacacgctgtatctgcaaatgaacagcctgagagccgaggacacggctgtgtattactgtgcgagagatcaggcgatttttggagtggtccccgactactggggccagggaaccctggtcaccgtctcctca

SEQ ID NO: 1803 - DNA, 360 bp, synthetic construct; identical to SEQ ID NO: 1802
  misc_feature 1..360: note = source = /note="Description of Artificial Sequence: Synthetic polynucleotide"
  source 1..360: mol_type = other DNA

SEQ ID NO: 1804 - DNA, 360 bp, synthetic construct; identical to SEQ ID NO: 1798
  misc_feature 1..360: note = source = /note="Description of Artificial Sequence: Synthetic polynucleotide"
  source 1..360: mol_type = other DNA

SEQ ID NO: 1805 - DNA, 360 bp, synthetic construct; identical to SEQ ID NO: 1802
  misc_feature 1..360: note = source = /note="Description of Artificial Sequence: Synthetic polynucleotide"
  source 1..360: mol_type = other DNA

SEQ ID NO: 1806 - DNA, 378 bp, synthetic construct
  misc_feature 1..378: note = source = /note="Description of Artificial Sequence: Synthetic polynucleotide"
  source 1..378: mol_type = other DNA
caggtgcagttgcaggagtcgggcccaggactggtgaagccttcagagaccctgtccctcacctgcactgtctctggtgactccatcagcagtggtggttactactggagctggatccgccagcccccagggaagggcctggagtggattgggtacatctattacagtgggagcacctactacaacccgtccctcaagagtcgagttaccatatcagtagacacgtctaagaaccagttctccctgaagctgagctctgtgactgccgcggacacggccgtgtattactgtgcgagagatcgtattacgatttttggagtggttatggggggcggtatggacgtctggggccaagggaccacggtcaccgtctcctca

SEQ ID NO: 1807 - DNA, 378 bp, synthetic construct; identical to SEQ ID NO: 1806
  misc_feature 1..378: note = source = /note="Description of Artificial Sequence: Synthetic polynucleotide"
  source 1..378: mol_type = other DNA

SEQ ID NO: 1808 - DNA, 378 bp, synthetic construct
  misc_feature 1..378: note = source = /note="Description of Artificial Sequence: Synthetic polynucleotide"
  source 1..378: mol_type = other DNA
caggtgcagttgcaggagtcgggcccaggactggtgaagccttcacagaccctgtccctcacctgcactgtctctggtgactccatcagcagtggtggttactactggagctggatccgccagcccccagggaagggcctggagtggattgggtacatctattacagtgggagcacctactacaacccgtccctcaagagtcgagttaccatatcagtagacacgtctaagaaccagttctccctgaagctgagctctgtgactgccgcggacacggccgtgtattactgtgcgagagatcgtattacgatttttggagtggttatggggggcggtatggacgtctggggccaagggaccacggtcaccgtctcctca

SEQ ID NO: 1809 - DNA, 378 bp, synthetic construct
  misc_feature 1..378: note = source = /note="Description of Artificial Sequence: Synthetic polynucleotide"
  source 1..378: mol_type = other DNA
caggtgcagttgcaggagtcgggcccaggactggtgaagccttcagagaccctgtccctcacctgcactgtctctggtgactccatcagcagtggtggttactactggagctggatccgccagcacccagggaagggcctggagtggattgggtacatctattacagtgggagcacctactacaacccgtccctcaagagtcgagttaccatatcagtagacacgtctaagaaccagttctccctgaagctgagctctgtgactgccgcggacacggccgtgtattactgtgcgagagatcgtattacgatttttggagtggttatggggggcggtatggacgtctggggccaagggaccacggtcaccgtctcctca

SEQ ID NO: 1810 - DNA, 378 bp, synthetic construct; identical to SEQ ID NO: 1736
  misc_feature 1..378: note = source = /note="Description of Artificial Sequence: Synthetic polynucleotide"
  source 1..378: mol_type = other DNA

SEQ ID NO: 1811 - DNA, 378 bp, synthetic construct; identical to SEQ ID NO: 1809
  misc_feature 1..378: note = source = /note="Description of Artificial Sequence: Synthetic polynucleotide"
  source 1..378: mol_type = other DNA

SEQ ID NO: 1812 - DNA, 378 bp, synthetic construct; identical to SEQ ID NO: 1808
  misc_feature 1..378: note = source = /note="Description of Artificial Sequence: Synthetic polynucleotide"
  source 1..378: mol_type = other DNA

SEQ ID NO: 1813 - DNA, 369 bp, synthetic construct
  misc_feature 1..369: note = source = /note="Description of Artificial Sequence: Synthetic polynucleotide"
  source 1..369: mol_type = other DNA
caggtgcagctggtgcagtctggggctgaggtgaagaagcctggggcctcagtgaaggtctcctgcaaggcttctggatacaccttcaccggctactatatccactgggtgcgacaggcccctggacaagggcttgagtggatggggtggatcaaccctgaaagtggtggcacagactattcacagaggtttcagggcagggtcaccatgaccagggacacgtccatcagcacagcctacatggaactgaacaggctgagatctgacgacacggccgtgtattactgtgcgagagaggccacgatttttggaatggttattgtaccgtttgactactggggccagggaaccctggtcaccgtctcctca

SEQ ID NO: 1814 - DNA, 369 bp, synthetic construct
  misc_feature 1..369: note = source = /note="Description of Artificial Sequence: Synthetic polynucleotide"
  source 1..369: mol_type = other DNA
caggtgccgctggtgcagtctggggctgaggtgaagaagcctggggcctcagtgaaggtctcctgcaaggcttctggatacaccttcaccggctactatatccactgggtgcgacaggcccctggacaagggcttgagtggatggggtggatcaaccctgaaagtggtggcacagactattcacagaggtttcagggcaggttcaccatgaccagggacacgtccatcagcacagcctacatggaactgaacaggctgagatctgacgacacggccgtgtattactgtgcgagagaggccacgatttttggaatggttattgtaccgtttgactactggggccagggaaccctggtcaccgtctcctca

SEQ ID NO: 1815 - DNA, 369 bp, synthetic construct
  misc_feature 1..369: note = source = /note="Description of Artificial Sequence: Synthetic polynucleotide"
  source 1..369: mol_type = other DNA
caggtgcagctggtgcagtctggggctgaggtgaagaagcctggggcctcagtgaaggtctcctgcaaggcttctggatacaccttcaccggctactatatccactgggtgcgacaggcccctggacaagggcttgagtggatggggtggatcaaccctgacgctggtggcacagactattcacagaggtttcagggcagggtcaccatgaccagggacacgtccatcagcacagcctacatggaactgaacaggctgagatctgacgacacggccgtgtattactgtgcgagagaggccacgatttttggaatggttattgtaccgtttgactactggggccagggaaccctggtcaccgtctcctca

SEQ ID NO: 1816 - DNA, 369 bp, synthetic construct
  misc_feature 1..369: note = source = /note="Description of Artificial Sequence: Synthetic polynucleotide"
  source 1..369: mol_type = other DNA
caggtgccgctggtgcagtctggggctgaggtgaagaagcctggggcctcagtgaaggtctcctgcaaggcttctggatacaccttcaccggctactatatccactgggtgcgacaggcccctggacaagggcttgagtggatggggtggatcaaccctgacgctggtggcacagactattcacagaggtttcagggcaggttcaccatgaccagggacacgtccatcagcacagcctacatggaactgaacaggctgagatctgacgacacggccgtgtattactgtgcgagagaggccacgatttttggaatggttattgtaccgtttgactactggggccagggaaccctggtcaccgtctcctca

SEQ ID NO: 1817 - DNA, 369 bp, synthetic construct
  misc_feature 1..369: note = source = /note="Description of Artificial Sequence: Synthetic polynucleotide"
  source 1..369: mol_type = other DNA
caggtgcagctggtgcagtctggggctgaggtgaagaagcctggggcctcagtgaaggtctcctgcaaggcttctggatacaccttcaccggctactatatccactgggtgcgacaggcccctggacaagggcttgagtggatggggtggatcaaccctgacagtggtggcacagactattcacagaggtttcagggcagggtcaccatgaccagggacacgtccatcagcacagcctacatggaactgaacaggctgagatctgacgacacggccgtgtattactgtgcgagagaggccacgatttttggaatggttattgtaccgtttgactactggggccagggaaccctggtcaccgtctcctca

SEQ ID NO: 1818 - DNA, 369 bp, synthetic construct
  misc_feature 1..369: note = source = /note="Description of Artificial Sequence: Synthetic polynucleotide"
  source 1..369: mol_type = other DNA
caggtgcagctggtgcagtctggggctgaggtgaagaagcctggggcctcagtgaaggtctcctgcaaggcttctggatacaccttcaccggctactatatccactgggtgcgacaggcccctggacaagggcttgagtggatggggtggatcaaccctgacagtggtggcacagactattcacagaggtttcagggcaggttcaccatgaccagggacacgtccatcagcacagcctacatggaactgaacaggctgagatctgacgacacggccgtgtattactgtgcgagagaggccacgatttttggaatggttattgtaccgtttgactactggggccagggaaccctggtcaccgtctcctca

SEQ ID NO: 1819 - DNA, 369 bp, synthetic construct
  misc_feature 1..369: note = source = /note="Description of Artificial Sequence: Synthetic polynucleotide"
  source 1..369: mol_type = other DNA
caggtgccgctggtgcagtctggggctgaggtgaagaagcctggggcctcagtgaaggtctcctgcaaggcttctggatacaccttcaccggctactatatccactgggtgcgacaggcccctggacaagggcttgagtggatggggtggatcaaccctgacagtggtggcacagactattcacagaggtttcagggcagggtcaccatgaccagggacacgtccatcagcacagcctacatggaactgaacaggctgagatctgacgacacggccgtgtattactgtgcgagagaggccacgatttttggaatggttattgtaccgtttgactactggggccagggaaccctggtcaccgtctcctca

SEQ ID NO: 1820 - DNA, 369 bp, synthetic construct
  misc_feature 1..369: note = source = /note="Description of Artificial Sequence: Synthetic polynucleotide"
  source 1..369: mol_type = other DNA
caggtgcagctggtgcagtctggggctgaggtgaagaagcctggggcctcagtgaaggtctcctgcaaggcttctggatacaccttcaccggctactatatccactgggtgcgacaggcccctggacaagggcttgagtggatggggtggatcaaccctgacgctggtggcacagactattcacagaggtttcagggcaggttcaccatgaccagggacacgtccatcagcacagcctacatggaactgaacaggctgagatctgacgacacggccgtgtattactgtgcgagagaggccacgatttttggaatggttattgtaccgtttgactactggggccagggaaccctggtcaccgtctcctca

SEQ ID NO: 1821 - DNA, 369 bp, synthetic construct
  misc_feature 1..369: note = source = /note="Description of Artificial Sequence: Synthetic polynucleotide"
  source 1..369: mol_type = other DNA
caggtgccgctggtgcagtctggggctgaggtgaagaagcctggggcctcagtgaaggtctcctgcaaggcttctggatacaccttcaccggctactatatccactgggtgcgacaggcccctggacaagggcttgagtggatggggtggatcaaccctgacgctggtggcacagactattcacagaggtttcagggcagggtcaccatgaccagggacacgtccatcagcacagcctacatggaactgaacaggctgagatctgacgacacggccgtgtattactgtgcgagagaggccacgatttttggaatggttattgtaccgtttgactactggggccagggaaccctggtcaccgtctcctca

SEQ ID NO: 1822 - DNA, 369 bp, synthetic construct
  misc_feature 1..369: note = source = /note="Description of Artificial Sequence: Synthetic polynucleotide"
  source 1..369: mol_type = other DNA
caggtgcagctggtgcagtctggggctgaggtgaagaagcctggggcctcagtgaaggtctcctgcaaggcttctggatacaccttcaccggctactatatccactgggtgcgacaggcccctggacaagggcttgagtggatggggtggatcaaccctgacgctggtggcacagactattcacagaggtttcagggcagggtcaccatgaccagggacacgtccatcagcacagcctacatggaactgaacagcctgagatctgacgacacggccgtgtattactgtgcgagagaggccacgatttttggaatggttattgtaccgtttgactactggggccagggaaccctggtcaccgtctcctca

SEQ ID NO: 1823 - DNA, 369 bp, synthetic construct
  misc_feature 1..369: note = source = /note="Description of Artificial Sequence: Synthetic polynucleotide"
  source 1..369: mol_type = other DNA
caggtgcagctggtgcagtctggggctgaggtgaagaagcctggggcctcagtgaaggtctcctgcaaggcttctggatacaccttcaccggctactatatccactgggtgcgacaggcccctggacaagggcttgagtggatggggtggatcaaccctgaaagtggtggcacagactattcacagaggtttcagggcagggtcaccatgaccagggacacgtccatcagcacagcctacatggaactgaacagcctgagatctgacgacacggccgtgtattactgtgcgagagaggccacgatttttggaatggttattgtaccgtttgactactggggccagggaaccctggtcaccgtctcctca

SEQ ID NO: 1824 - DNA, 369 bp, synthetic construct
  misc_feature 1..369: note = source = /note="Description of Artificial Sequence: Synthetic polynucleotide"
  source 1..369: mol_type = other DNA
caggtgccgctggtacagtctggggctgaggtgaagaagcctggggcctcagtgaaggtctcctgcaaggcttctggatacaccttcaccggctactatatacactgggtgcgtcaggcccctggacaagggcttgtgtggatggggtggatcagccctaacagtggtgaaacaagctatgcacagaagtttcaggacagggtcaccatgaccagggacacgtccatcagcacagcctatatggagctgagcagactgagatctgacgacacggccgtgtatttctgtgcgagagaggccacgatttttggaatgcttattgtaccatttgactactggggccagggaaccctggtcaccgtctcctca

SEQ ID NO: 1825 - DNA, 369 bp, synthetic construct
  misc_feature 1..369: note = source = /note="Description of Artificial Sequence: Synthetic polynucleotide"
  source 1..369: mol_type = other DNA
caggtgccgctggtacagtctggggctgaggtgaagaagcctggggcctcagtgaaggtctcctgcaaggcttctggatacaccttcaccggctactatatacactgggtgcgtcaggcccctggacaagggcttgtgtggatggggtggatcagccctaacagtggtgacacaagctatgcacagaagtttcaggacagggtcaccatgaccagggacacgtccatcagcacagcctatatggagctgagcagactgagatctgacgacacggccgtgtatttctgtgcgagagaggccacgatttttggaatgcttattgtaccatttgactactggggccagggaaccctggtcaccgtctcctca

SEQ ID NO: 1826 - DNA, 369 bp, synthetic construct; identical to SEQ ID NO: 1824
  misc_feature 1..369: note = source = /note="Description of Artificial Sequence: Synthetic polynucleotide"
  source 1..369: mol_type = other DNA

SEQ ID NO: 1827 - DNA, 369 bp, synthetic construct
  misc_feature 1..369: note = source = /note="Description of Artificial Sequence: Synthetic polynucleotide"
  source 1..369: mol_type = other DNA
caggtgccgctggtacagtctggggctgaggtgaagaagcctggggcctcagtgaaggtctcctgcaaggcttctggatacaccttcaccggctactatatacactgggtgcgtcaggcccctggacaagggcttgtgtggatggggtggatcagccctaacagtggtgaaacaagctatgcacagaagtttcaggacagggtcaccatgaccagggacacgtccatcagcacagcctatatggagctgagcagactgagatctgacgacacggccgtgtatttctgtacgagagaggccacgatttttggaatgcttattgtaccatttgactactggggccagggaaccctggtcaccgtctcctca

SEQ ID NO: 1828 - DNA, 369 bp, synthetic construct; identical to SEQ ID NO: 1734
  misc_feature 1..369: note = source = /note="Description of Artificial Sequence: Synthetic polynucleotide"
  source 1..369: mol_type = other DNA

SEQ ID NO: 1829 - DNA, 369 bp, synthetic construct; identical to SEQ ID NO: 1827
  misc_feature 1..369: note = source = /note="Description of Artificial Sequence: Synthetic polynucleotide"
  source 1..369: mol_type = other DNA

SEQ ID NO: 1830 - DNA, 369 bp, synthetic construct; identical to SEQ ID NO: 1825
  misc_feature 1..369: note = source = /note="Description of Artificial Sequence: Synthetic polynucleotide"
  source 1..369: mol_type = other DNA

SEQ ID NO: 1831 - DNA, 369 bp, synthetic construct
  misc_feature 1..369: note = source = /note="Description of Artificial Sequence: Synthetic polynucleotide"
  source 1..369: mol_type = other DNA
caggtgcagctggtacagtctggggctgaggtgaagaagcctggggcctcagtgaaggtctcctgcaaggcttctggatacaccttcaccggctactatatacactgggtgcgtcaggcccctggacaagggcttgagtggatggggtggatcagccctaacagtggtgaaacaagctatgcacagaagtttcaggacagggtcaccatgaccagggacacgtccatcagcacagcctatatggagctgagcagcctgagatctgacgacacggccgtgtatttctgtgcgagagaggccacgatttttggaatgcttattgtaccatttgactactggggccagggaaccctggtcaccgtctcctca

SEQ ID NO: 1832 - DNA, 369 bp, synthetic construct
  misc_feature 1..369: note = source = /note="Description of Artificial Sequence: Synthetic polynucleotide"
  source 1..369: mol_type = other DNA
caggtgcagctggtacagtctggggctgaggtgaagaagcctggggcctcagtgaaggtctcctgcaaggcttctggatacaccttcaccggctactatatacactgggtgcgtcaggcccctggacaagggcttgagtggatggggtggatcagccctaacagtggtgaaacaagctatgcacagaagtttcaggacagggtcaccatgaccagggacacgtccatcagcacagcctatatggagctgagcagactgagatctgacgacacggccgtgtatttctgtgcgagagaggccacgatttttggaatgcttattgtaccatttgactactggggccagggaaccctggtcaccgtctcctca

SEQ ID NO: 1833 - DNA, 369 bp, synthetic construct
  misc_feature 1..369: note = source = /note="Description of Artificial Sequence: Synthetic polynucleotide"
  source 1..369: mol_type = other DNA
caggtgccgctggtgcagtctggggctgaggtgaagaagcctggggcctcagtgaaggtctcctgcaaggcttctggatacaccttcaccggctactatatccactgggtgcgacaggcccctggacaaggacttgagtggatggggtggatcaaccctgaaagtggtggcacagactattcacagaggtttcagggcagggtcaccatgaccagggacacgtccatcagcacagcctacatggaactgagcaggctgagatctgacgacacggccgtgtattactgtgcgagagaggccacgatttttggaatggttattgtaccgtttgactactggggccagggaaccctggtcaccgtctcctca

SEQ ID NO: 1834 - DNA, 369 bp, synthetic construct
  misc_feature 1..369: note = source = /note="Description of Artificial Sequence: Synthetic polynucleotide"
  source 1..369: mol_type = other DNA
caggtgccgctggtgcagtctggggctgaggtgaagaagcctggggcctcagtgaaggtctcctgcaaggcttctggatacaccttcaccggctactatatccactgggtgcgacaggcccctggacaaggacttgagtggatggggtggatcaaccctgaaagtggtggcacagactattcacagaggtttcagggcaggttcaccatgaccagggacacgtccatcagcacagcctacatggaactgagcaggctgagatctgacgacacggccgtgtattactgtgcgagagaggccacgatttttggaatggttattgtaccgtttgactactggggccagggaaccctggtcaccgtctcctca

SEQ ID NO: 1835 - DNA, 369 bp, synthetic construct
  misc_feature 1..369: note = source = /note="Description of Artificial Sequence: Synthetic polynucleotide"
  source 1..369: mol_type = other DNA
caggtgccgctggtgcagtctggggctgaggtgaagaagcctggggcctcagtgaaggtctcctgcaaggcttctggatacaccttcaccggctactatatccactgggtgcgacaggcccctggacaaggacttgagtggatggggtggatcaaccctgacagtggtggcacagactattcacagaggtttcagggcagggtcaccatgaccagggacacgtccatcagcacagcctacatggaactgagcaggctgagatctgacgacacggccgtgtattactgtgcgagagaggccacgatttttggaatggttattgtaccgtttgactactggggccagggaaccctggtcaccgtctcctca

SEQ ID NO: 1836 - DNA, 369 bp, synthetic construct
  misc_feature 1..369: note = source = /note="Description of Artificial Sequence: Synthetic polynucleotide"
  source 1..369: mol_type = other DNA
caggtgcagctggtgcagtctggggctgaggtgaagaagcctggggcctcagtgaaggtctcctgcaaggcttctggatacaccttcaccggctactatatccactgggtgcgacaggcccctggacaaggacttgagtggatggggtggatcaaccctgaaagtggtggcacagactattcacagaggtttcagggcagggtcaccatgaccagggacacgtccatcagcacagcctacatggaactgagcagcctgagatctgacgacacggccgtgtattactgtgcgagagaggccacgatttttggaatggttattgtaccgtttgactactggggccagggaaccctggtcaccgtctcctca

SEQ ID NO: 1837 - DNA, 369 bp, synthetic construct; identical to SEQ ID NO: 1833
  misc_feature 1..369: note = source = /note="Description of Artificial Sequence: Synthetic polynucleotide"
  source 1..369: mol_type = other DNA

SEQ ID NO: 1838 - DNA, 369 bp, synthetic construct
  misc_feature 1..369: note = source = /note="Description of Artificial Sequence: Synthetic polynucleotide"
  source 1..369: mol_type = other DNA
caggtgccgctggtgcagtctggggctgaggtgaagaagcctggggcctcagtgaaggtctcctgcaaggcttctggatacaccttcaccggctactatatacactgggtgcgtcaggcccctggacaagggcttgagtggatggggtggataagccctaaccaaggtgaaacaaactatgcacagaagtttcaggacagggtcaccatgaccagggacacgtccatcagcacagcctatatggagctgagcaggctgagatctgacgacacggccgtgtattactgtgcgagagaggccacgatttttggaatgcttattgtaccatttgactactggggccagggaaccctggtcaccgtctcctca

SEQ ID NO: 1839 - DNA, 369 bp, synthetic construct
  misc_feature 1..369: note = source = /note="Description of Artificial Sequence: Synthetic polynucleotide"
  source 1..369: mol_type = other DNA
caggtgccgctggtgcagtctggggctgaggtgaagaagcctggggcctcagtgaaggtctcctgcaaggcttctggatacaccttcaccggctactatatacactgggtgcgtcaggcccctggacaagggcttgagtggatggggtggataagccctaaccaaggtgacacaaactatgcacagaagtttcaggacagggtcaccatgaccagggacacgtccatcagcacagcctatatggagctgagcaggctgagatctgacgacacggccgtgtattactgtgcgagagaggccacgatttttggaatgcttattgtaccatttgactactggggccagggaaccctggtcaccgtctcctca

SEQ ID NO: 1840 - DNA, 369 bp, synthetic construct
  misc_feature 1..369: note = source = /note="Description of Artificial Sequence: Synthetic polynucleotide"
  source 1..369: mol_type = other DNA
caggtgccgctggtgcagtctggggctgaggtgaagaagcctggggcctcagtgaaggtctcctgcaaggcttctggatacaccttcaccggctactatatacactgggtgcgtcaggcccctggacaagggcttgagtggatggggtggataagccctaaccaaggtgaaacaaactatgcacagaagtttcaggacagggtcaccatgaccagggacacgtccatcagcacagcctatatggagctgagcaggctgagatctgacgacacggccgtgtattactgtacgagagaggccacgatttttggaatgcttattgtaccatttgactactggggccagggaaccctggtcaccgtctcctca

SEQ ID NO: 1841 - DNA, 369 bp, synthetic construct
  misc_feature 1..369: note = source = /note="Description of Artificial Sequence: Synthetic polynucleotide"
  source 1..369: mol_type = other DNA
caggtgccgctggtgcagtctggggctgaggtgaagaagcctggggcctcagtgaaggtctcctgcaaggcttctggatacaccttcaccggctactatatacactgggtgcgtcaggcccctggacaagggcttgagtggatggggtggataagccctaacaatggtgaaacaaactatgcacagaagtttcaggacagggtcaccatgaccagggacacgtccatcagcacagcctatatggagctgagcaggctgagatctgacgacacggccgtgtattactgtgcgagagaggccacgatttttggaatgcttattgtaccatttgactactggggccagggaaccctggtcaccgtctcctca

SEQ ID NO: 1842 - DNA, 369 bp, synthetic construct
  misc_feature 1..369: note = source = /note="Description of Artificial Sequence: Synthetic polynucleotide"
  source 1..369: mol_type = other DNA
caggtgccgctggtgcagtctggggctgaggtgaagaagcctggggcctcagtgaaggtctcctgcaaggcttctggatacaccttcaccggctactatatacactgggtgcgtcaggcccctggacaagggcttgagtggatggggtggataagccctaacaatggtgacacaaactatgcacagaagtttcaggacagggtcaccatgaccagggacacgtccatcagcacagcctatatggagctgagcaggctgagatctgacgacacggccgtgtattactgtgcgagagaggccacgatttttggaatgcttattgtaccatttgactactggggccagggaaccctggtcaccgtctcctca

SEQ ID NO: 1843 - DNA, 369 bp, synthetic construct
  misc_feature 1..369: note = source = /note="Description of Artificial Sequence: Synthetic polynucleotide"
  source 1..369: mol_type = other DNA
caggtgccgctggtgcagtctggggctgaggtgaagaagcctggggcctcagtgaaggtctcctgcaaggcttctggatacaccttcaccggctactatatacactgggtgcgtcaggcccctggacaagggcttgagtggatggggtggataagccctaaccaaggtgacacaaactatgcacagaagtttcaggacagggtcaccatgaccagggacacgtccatcagcacagcctatatggagctgagcaggctgagatctgacgacacggccgtgtattactgtacgagagaggccacgatttttggaatgcttattgtaccatttgactactggggccagggaaccctggtcaccgtctcctca

SEQ ID NO: 1844 - DNA, 369 bp, synthetic construct
  misc_feature 1..369: note = source = /note="Description of Artificial Sequence: Synthetic polynucleotide"
  source 1..369: mol_type = other DNA
caggtgccgctggtgcagtctggggctgaggtgaagaagcctggggcctcagtgaaggtctcctgcaaggcttctggatacaccttcaccggctactatatacactgggtgcgtcaggcccctggacaagggcttgagtggatggggtggataagccctaacaatggtgaaacaaactatgcacagaagtttcaggacagggtcaccatgaccagggacacgtccatcagcacagcctatatggagctgagcaggctgagatctgacgacacggccgtgtattactgtacgagagaggccacgatttttggaatgcttattgtaccatttgactactggggccagggaaccctggtcaccgtctcctca

SEQ ID NO: 1845 - DNA, 369 bp, synthetic construct; identical to SEQ ID NO: 1838
  misc_feature 1..369: note = source = /note="Description of Artificial Sequence: Synthetic polynucleotide"
  source 1..369: mol_type = other DNA

SEQ ID NO: 1846 - DNA, 369 bp, synthetic construct; identical to SEQ ID NO: 1842
  misc_feature 1..369: note = source = /note="Description of Artificial Sequence: Synthetic polynucleotide"
  source 1..369: mol_type = other DNA

SEQ ID NO: 1847 - DNA, 369 bp, synthetic construct; identical to SEQ ID NO: 1839
  misc_feature 1..369: note = source = /note="Description of Artificial Sequence: Synthetic polynucleotide"
  source 1..369: mol_type = other DNA

SEQ ID NO: 1848 - DNA, 369 bp, synthetic construct; identical to SEQ ID NO: 1841
  misc_feature 1..369: note = source = /note="Description of Artificial Sequence: Synthetic polynucleotide"
  source 1..369: mol_type = other DNA

SEQ ID NO: 1849 - DNA, 369 bp, synthetic construct
  misc_feature 1..369: note = source = /note="Description of Artificial Sequence: Synthetic polynucleotide"
  source 1..369: mol_type = other DNA
caggtgcagctggtgcagtctggggctgaggtgaagaagcctggggcctcagtgaaggtctcctgcaaggcttctggatacaccttcaccggctactatatacactgggtgcgtcaggcccctggacaagggcttgagtggatggggtggataagccctaaccaaggtgaaacaaactatgcacagaagtttcaggacagggtcaccatgaccagggacacgtccatcagcacagcctatatggagctgagcagcctgagatctgacgacacggccgtgtattactgtgcgagagaggccacgatttttggaatgcttattgtaccatttgactactggggccagggaaccctggtcaccgtctcctca

SEQ ID NO: 1850 - DNA, 369 bp, synthetic construct; identical to SEQ ID NO: 1849
  misc_feature 1..369: note = source = /note="Description of Artificial Sequence: Synthetic polynucleotide"
  source 1..369: mol_type = other DNA

SEQ ID NO: 1851 - DNA, 384 bp, synthetic construct; identical to SEQ ID NO: 1728
  misc_feature 1..384: note = source = /note="Description of Artificial Sequence: Synthetic polynucleotide"
  source 1..384: mol_type = other DNA

SEQ ID NO: 1852 - DNA, 384 bp, synthetic construct; identical to SEQ ID NO: 1728
  misc_feature 1..384: note = source = /note="Description of Artificial Sequence: Synthetic polynucleotide"
  source 1..384: mol_type = other DNA

SEQ ID NO: 1853 - DNA, 384 bp, synthetic construct; identical to SEQ ID NO: 1728
  misc_feature 1..384: note = source = /note="Description of Artificial Sequence: Synthetic polynucleotide"
  source 1..384: mol_type = other DNA

SEQ ID NO: 1854 - DNA, 384 bp, synthetic construct; identical to SEQ ID NO: 1728
  misc_feature 1..384: note = source = /note="Description of Artificial Sequence: Synthetic polynucleotide"
  source 1..384: mol_type = other DNA

SEQ ID NO: 1855 - DNA, 384 bp, synthetic construct; identical to SEQ ID NO: 1728
  misc_feature 1..384: note = source = /note="Description of Artificial Sequence: Synthetic polynucleotide"
  source 1..384: mol_type = other DNA

SEQ ID NO: 1856 - DNA, 384 bp, synthetic construct; identical to SEQ ID NO: 1728
  misc_feature 1..384: note = source = /note="Description of Artificial Sequence: Synthetic polynucleotide"
  source 1..384: mol_type = other DNA

SEQ ID NO: 1857 - DNA, 384 bp, synthetic construct; identical to SEQ ID NO: 1728
  misc_feature 1..384: note = source = /note="Description of Artificial Sequence: Synthetic polynucleotide"
  source 1..384: mol_type = other DNA

SEQ ID NO: 1858 - DNA, 384 bp, synthetic construct; identical to SEQ ID NO: 1728
  misc_feature 1..384: note = source = /note="Description of Artificial Sequence: Synthetic polynucleotide"
  source 1..384: mol_type = other DNA

SEQ ID NO: 1859 - DNA, 384 bp, synthetic construct; identical to SEQ ID NO: 1728
  misc_feature 1..384: note = source = /note="Description of Artificial Sequence: Synthetic polynucleotide"
  source 1..384: mol_type = other DNA

SEQ ID NO: 1860 - DNA, 384 bp, synthetic construct; identical to SEQ ID NO: 1728
  misc_feature 1..384: note = source = /note="Description of Artificial Sequence: Synthetic polynucleotide"
  source 1..384: mol_type = other DNA

SEQ ID NO: 1861 - DNA, 384 bp, synthetic construct; identical to SEQ ID NO: 1728
  misc_feature 1..384: note = source = /note="Description of Artificial Sequence: Synthetic polynucleotide"
  source 1..384: mol_type = other DNA

SEQ ID NO: 1862 - DNA, 384 bp, synthetic construct; identical to SEQ ID NO: 1728
  misc_feature 1..384: note = source = /note="Description of Artificial Sequence: Synthetic polynucleotide"
  source 1..384: mol_type = other DNA

SEQ ID NO: 1863 - DNA, 384 bp, synthetic construct
  misc_feature 1..384: note = source = /note="Description of Artificial Sequence: Synthetic polynucleotide"
  source 1..384: mol_type = other DNA
cagatgcaggtggtgcagtctggggctgaggtgaagaagcctggggcctcagtgaaggtctcctgcaaggcttccggatacaccttcaccggctactatatgcattgggtgcgacaggcccctggacaagggcttgagtggatgggatggatcaaccctaacagtggtggcacaaactatgcacagaagtttcagggcagggtcaccatgaccagggacacgtccatcagtacagcctacatggagctgagcagcctgaggtctgacgacacggccgtgtattactgtgcgagagggggggattacgttttcgggacttatcggcctcactactactacggtatggacgtctggggccaagggaccacggtcaccgtctcctca

SEQ ID NO: 1864 - DNA, 384 bp, synthetic construct
  misc_feature 1..384: note = source = /note="Description of Artificial Sequence: Synthetic polynucleotide"
  source 1..384: mol_type = other DNA
cagatgcaggtggtgcagtctggggctgaggtgaagaagcctggggcctcagtgaaggtctcctgcaaggcttccggatacaccttcaccggctactatatgcattgggtgcgacaggcccctggacaagggcttgagtggatgggatggatcaaccctaacagtggtggcacaaactatgcacagaagtttcagggcagggtcaccatgaccagggacacgtccatcagtacagcctacatggagctgagcaggctgaggtctgacgacacggccgtgtattactgtgcgagagggggggattacgttttcgggacttatcggcctcactactactacggtatggacgtctggggccaagggaccacggtcaccgtctcctca

SEQ ID NO: 1865 - DNA, 363 bp, synthetic construct; identical to SEQ ID NO: 1765
  misc_feature 1..363: note = source = /note="Description of Artificial Sequence: Synthetic polynucleotide"
  source 1..363: mol_type = other DNA

SEQ ID NO: 1866 - DNA, 363 bp, synthetic construct; identical to SEQ ID NO: 1747
  misc_feature 1..363: note = source = /note="Description of Artificial Sequence: Synthetic polynucleotide"
  source 1..363: mol_type = other DNA

SEQ ID NO: 1867 - DNA, 384 bp, synthetic construct; identical to SEQ ID NO: 1728
  misc_feature 1..384: note = source = /note="Description of Artificial Sequence: Synthetic polynucleotide"
  source 1..384: mol_type = other DNA

SEQ ID NO: 1868 - DNA, 363 bp, synthetic construct
  misc_feature 1..363: note = source = /note="Description of Artificial Sequence: Synthetic polynucleotide"
  source 1..363: mol_type = other DNA
caggtgcagttggtggagtctgggggaggcgtggtccagcctgggaggtccctgagactctcctgtacagcgtctggattcaccttcagtagctatggcatacactgggtccgccaggctccaggcaaggggctggagtgggtggcagttatatggtatgatggaagtaataagttccatgcagactccgtgaagggccgattcaccatctccagagacaattccaagaacacgctgtatctgcaaatgaacagcctgagagccgaggactcggctatgtacttctgtgcgagaggaaaagtggctggtatgcctgaagcttttgaaatctggggccaagggacaaaggtcaccgtctcttca

SEQ ID NO: 1869 - DNA, 387 bp, synthetic construct
  misc_feature 1..387: note = source = /note="Description of Artificial Sequence: Synthetic polynucleotide"
  source 1..387: mol_type = other DNA
caaatgcagctggtgcagtctggggctgaggtgaagaagcctggggcctcagtgaaggtctcctgcaaggcttctggatacaccttcaccagttatgatatcaactgggtgcgacaggccactggacaagggcttgagtggatgggatggatgaaccctaacagtggtaacacaggctatgcacagaagttccagggcagagtcaccatgaccagggacacctccataagcacagcctacatggagctgagcagcctgagatctcaggacacggccgtgtattactgtgcgagagggggtgattacgtttgggggagttatcgtccctactactactactacggtatggacgtctggggccaagggaccacggtcaccgtctcctca

SEQ ID NO: 1870 - DNA, 363 bp, synthetic construct
  misc_feature 1..363: note = source = /note="Description of Artificial Sequence: Synthetic polynucleotide"
  source 1..363: mol_type = other DNA
caggtgcagttggtggagtctgggggaggcgtggtccagcctgggaggtccctgagactctcctgtgcagcgtctggattcaccttcagtagctatggcatacactgggtccgccaggctccaggcaaggggctggagtgggtggcagttatatggtatgatgcaagtaataagttccatgcagacgccgtgaagggccgattcaccatctccagagacaattccaagaacacgctgtatctgcaaatgaacagcctgagagccgaggactcggctatgtacttctgtgcgagaggaaaagtggctggtatgcctgaagcttttgaaatctggggccaagggacaaaggtcaccgtctcttca

SEQ ID NO: 1871 - DNA, 363 bp, synthetic construct
  misc_feature 1..363: note = source = /note="Description of Artificial Sequence: Synthetic polynucleotide"
  source 1..363: mol_type = other DNA
caggtgcagttggtggagtctgggggaggcgtggtccagcctgggaggtccctgagactctcctgtacagcgtctggattcaccttcagtagctatggcatacactgggtccgccaggctccaggcaaggggctggagtgggtggcagttatatggtatgatgcaagtaataagttccatgcagacgccgtgaagggccgattcaccatctccagagacaattccaagaacacgctgtatctgcaaatgaacagcctgagagccgaggactcggctatgtacttctgtgcgagaggaaaagtggctggtatgcctgaagcttttgaaatctggggccaagggacaaaggtcaccgtctcttca

SEQ ID NO: 1872 - DNA, 363 bp, synthetic construct; identical to SEQ ID NO: 1870
  misc_feature 1..363: note = source = /note="Description of Artificial Sequence: Synthetic polynucleotide"
  source 1..363: mol_type = other DNA

SEQ ID NO: 1873 - DNA, 363 bp, synthetic construct
  misc_feature 1..363: note = source = /note="Description of Artificial Sequence: Synthetic polynucleotide"
  source 1..363: mol_type = other DNA
caggtgcagttggtggagtctgggggaggcgtggtccagcctgggaggtccctgagactctcctgtgcagcgtctggattcaccttcagtagctatggcatacactgggtccgccaggctccaggcaaggggctggagtgggtggcagttatatggtatgatgcaagtaataagttccatgcagacgccgtgaagggccgattcaccatctccagagacaattccaagaacacgctgtatctgcaaatgaacagcctgagagccgaggactcggctatgtacttctgtgcgagaggaaaagtggctggtatgcctgaagcttttgaaatctggggccaagggacattggtcaccgtctcttca

SEQ ID NO: 1874 - DNA, 363 bp, synthetic construct
  misc_feature 1..363: note = source = /note="Description of Artificial Sequence: Synthetic polynucleotide"
  source 1..363: mol_type = other DNA
caggtgcagttggtggagtctgggggaggcgtggtccagcctgggaggtccctgagactctcctgtgcagcgtctggattcaccttcagtagctatggcatacactgggtccgccaggctccaggcaaggggctggagtgggtggcagttatatggtatgatgcaagtaataagttccatgcagactccgtgaagggccgattcaccatctccagagacaattccaagaacacgctgtatctgcaaatgaacagcctgagagccgaggactcggctatgtacttctgtgcgagaggaaaagtggctggtatgcctgaagcttttgaaatctggggccaagggacaaaggtcaccgtctcttca

SEQ ID NO: 1875 - DNA, 363 bp, synthetic construct
  misc_feature 1..363: note = source = /note="Description of Artificial Sequence: Synthetic polynucleotide"
  source 1..363: mol_type = other DNA
caggtgcagttggtggagtctgggggaggcgtggtccagcctgggaggtccctgagactctcctgtgcagcgtctggattcaccttcagtagctatggcatacactgggtccgccaggctccaggcaaggggctggagtgggtggcagttatatggtatgatggaagtaataagttccatgcagacgccgtgaagggccgattcaccatctccagagacaattccaagaacacgctgtatctgcaaatgaacagcctgagagccgaggactcggctatgtacttctgtgcgagaggaaaagtggctggtatgcctgaagcttttgaaatctggggccaagggacaaaggtcaccgtctcttca

SEQ ID NO: 1876 - DNA, 387 bp, synthetic construct
  misc_feature 1..387: note = source = /note="Description of Artificial Sequence: Synthetic polynucleotide"
  source 1..387: mol_type = other DNA
caaatgcagctggtgcagtctggggctgaggtgaagaagcctggggcctcagtgaaggtctcctgcaaggcttctggatacaccttcaccagttatgatatcaactgggtgcgacaggccactggacaagggcttgagtggatgggatggatgaaccctaacagtggtggcacaggctatgcacagaagttccagggcagagtcaccatgaccagggacacctccataagcacagcctacatggagctgagcagcctgagatctcaggacacggccgtgtattactgtgcgagagggggtgattacgtttgggggagttatcgtccctactactactactacggtatggacgtctggggccaagggaccacggtcaccgtctcctca

SEQ ID NO: 1877 - DNA, 387 bp, synthetic construct; identical to SEQ ID NO: 1869
  misc_feature 1..387: note = source = /note="Description of Artificial Sequence: Synthetic polynucleotide"
  source 1..387: mol_type = other DNA

SEQ ID NO: 1878 - DNA, 387 bp, synthetic construct; identical to SEQ ID NO: 1876
  misc_feature 1..387: note = source = /note="Description of Artificial Sequence: Synthetic polynucleotide"
  source 1..387: mol_type = other DNA

SEQ ID NO: 1879 - DNA, 387 bp, synthetic construct
  misc_feature 1..387: note = source = /note="Description of Artificial Sequence: Synthetic polynucleotide"
  source 1..387: mol_type = other DNA
caaatgcagctggtgcagtctggggctgaggtgaagaagcctggggcctcagtgaaggtctcctgcaaggcttctggatacaccttcaccagttatgatatcaactgggtgcgacaggcccctggacaagggcttgagtggatgggatggatgaaccctaacagtggtggcacaggctatgcacagaagttccagggcagagtcaccatgaccagggacacctccataagcacagcctacatggagctgagcagcctgagatctgacgacacggccgtgtattactgtgcgagagggggtgattacgtttgggggagttatcgtccctactactactactacggtatggacgtctggggccaagggaccacggtcaccgtctcctca

SEQ ID NO: 1880 - DNA, 387 bp, synthetic construct; identical to SEQ ID NO: 1876
  misc_feature 1..387: note = source = /note="Description of Artificial Sequence: Synthetic polynucleotide"
  source 1..387: mol_type = other DNA

SEQ ID NO: 1881 - DNA, 387 bp, synthetic construct
  misc_feature 1..387: note = source = /note="Description of Artificial Sequence: Synthetic polynucleotide"
  source 1..387: mol_type = other DNA
caaatgcagctggtgcagtctggggctgaggtgaagaagcctggggcctcagtgaaggtctcctgcaaggcttctggatacaccttcaccagttatgatatcaactgggtgcgacaggcccctggacaagggcttgagtggatgggatggatgaaccctaacagtggtaacacaggctatgcacagaagttccagggcagagtcaccatgaccagggacacctccataagcacagcctacatggagctgagcagcctgagatctgacgacacggccgtgtattactgtgcgagagggggtgattacgtttgggggagttatcgtccctactactactactacggtatggacgtctggggccaagggaccacggtcaccgtctcctca

SEQ ID NO: 1882 - DNA, 387 bp, synthetic construct
  misc_feature 1..387: note = source = /note="Description of Artificial Sequence: Synthetic polynucleotide"
  source 1..387: mol_type = other DNA
caaatgcagctggtgcagtctggggctgaggtgaagaagcctggggcctcagtgaaggtctcctgcaaggcttctggatacaccttcaccagttatgatatcaactgggtgcgacaggccactggacaagggcttgagtggatgggatggatgaaccctaacagtggtggcacaggctatgcacagaagttccagggcagagtcaccatgaccagggacacctccataagcacagcctacatggagctgagcagcctgagatctcaggacacggccgtgtattactgtgcgagagggggtgattacgttttcgggagttatcgtccctactactactactacggtatggacgtctggggccaagggaccacggtcaccgtctcctca

SEQ ID NO: 1883 - DNA, 387 bp, synthetic construct
  misc_feature 1..387: note = source = /note="Description of Artificial Sequence: Synthetic polynucleotide"
  source 1..387: mol_type = other DNA
caaatgcagctggtgcagtctggggctgaggtgaagaagcctggggcctcagtgaaggtctcctgcaaggcttctggatacaccttcaccagttatgatatcaactgggtgcgacaggcccctggacaagggcttgagtggatgggatggatgaaccctaacagtggtggcacaggctatgcacagaagttccagggcagagtcaccatgaccagggacacctccataagcacagcctacatggagctgagcagcctgagatctgacgacacggccgtgtattactgtgcgagagggggtgattacgttttcgggagttatcgtccctactactactactacggtatggacgtctggggccaagggaccacggtcaccgtctcctca

SEQ ID NO: 1884 - DNA, 363 bp, synthetic construct; identical to SEQ ID NO: 1873
  misc_feature 1..363: note = source = /note="Description of Artificial Sequence: Synthetic polynucleotide"
  source 1..363: mol_type = other DNA

SEQ ID NO: 1885 - DNA, 648 bp, synthetic construct
  misc_feature 1..648: note = source = /note="Description of Artificial Sequence: Synthetic polynucleotide"
  source 1..648: mol_type = other DNA
cagtctgtgctgactcagccaccctcagcgtctgggacccccgggcagagggtcaccatctcttgttctggaagtagctccaacatcggaagtaatactgtaaactggtaccagcacctcccaggaacggcccccaaactcctcatctatactaataatcagcggccctcaggggtccctgaccgattctctggctccaagtctggcacctcagcctcccttgccatcagtgggctccagtctgaggatgaggctgattatttctgtgcaacattcgatgacagcctgaatggtccggtattcggcggagggaccaagctgaccgtcctaggtcagcccaaggctgccccctcggtcactctgttcccgccctcctctgaggagcttcaagccaacaaggccacactggtgtgtctcataagtgacttctacccgggagccgtgacagtggcctggaaggcagatagcagccccgtcaaggcgggagtggagaccaccacaccctccaaacaaagcaacaacaagtacgcggccagcagctatctgagcctgacgcctgagcagtggaagtcccacagaagctacagctgccaggtcacgcatgaagggagcaccgtggagaagacagtggcccctacagaatgttca

SEQ ID NO: 1886 - DNA, 642 bp, synthetic construct
  misc_feature 1..642: note = source = /note="Description of Artificial Sequence: Synthetic polynucleotide"
  source 1..642: mol_type = other DNA
gacatccagatgacccagtctccatcctccctgtctgcatctataggagacagagtcaccatcacttgccgggcaagtcaggacattagagattatttaggctggtatcagcagaaaccagggaaagcccctaagcgcctgatctatggtgcatccagtttgcaaagtggggtcccttcaaggttcagcggcagtggatctgggacagaattcactctcacaatcagcagcctgcagcctgaagatttcgcaacttattactgtctacagcataataattaccccttcactttcggccctgggaccaaagtggatatcaaacgaacggtggctgcaccatctgtcttcatcttcccgccatctgatgagcagttgaaatctggaactgcctctgttgtgtgcctgctgaataacttctatcccagagaggccaaagtacagtggaaggtggataacgccctccaatcgggtaactcccaggagagtgtcacagagcaggacagcaaggacagcacctacagcctcagcagcaccctgacgctgagcaaagcagactacgagaaacacaaagtctacgcctgcgaagtcacccatcagggcctgagctcgcccgtcacaaagagcttcaacaggggagagtgt

SEQ ID NO: 1887 - DNA, 642 bp, synthetic construct; identical to SEQ ID NO: 1886
  misc_feature 1..642: note = source = /note="Description of Artificial Sequence: Synthetic polynucleotide"
  source 1..642: mol_type = other DNA

SEQ ID NO: 1888 - DNA, 639 bp, synthetic construct
  misc_feature 1..639: note = source = /note="Description of Artificial Sequence: Synthetic polynucleotide"
  source 1..639: mol_type = other DNA
gacatccagatgacccagtctccatcctccctgtctgcatctgtaggagacagagtcaccatcacttgccaggcgagtcaggacattagcaactatttaaattggtatcagcagaaaccagggaaagcccctaagctcctgatctacgatgcatccaatttggaaacaggggtcccatcaaggttcagtggaagtggatctgggacagattttagtttcaccatcagcagcctgcagcctgaagatattgcaacatattactgtcaacagtatgatattctcctcactttcggcggagggaccaaggtggagatcaagcgaacggtggctgcaccatctgtcttcatcttcccgccatctgatgagcagttgaaatctggaactgcctctgttgtgtgcctgctgaataacttctatcccagagaggccaaagtacagtggaaggtggataacgccctccaatcgggtaactcccaggagagtgtcacagagcaggacagcaaggacagcacctacagcctcagcagcaccctgacgctgagcaaagcagactacgagaaacacaaagtctacgcctgcgaagtcacccatcagggcctgagctcgcccgtcacaaagagcttcaacaggggagagtgt

SEQ ID NO: 1889 - DNA, 660 bp, synthetic construct
  misc_feature 1..660: note = source = /note="Description of Artificial Sequence: Synthetic polynucleotide"
  source 1..660: mol_type = other DNA
gacatcgtgatgacccagtctccagactccctggctgtgtctctgggcgagagggccaccatcaactgcaagtccagccagagtgttttatccagctccaacaataagaactacatagcttggtaccagcagcaaccaggacatcctcctaagctgctcatttactgggcatctacccgggaatccggggtccctgaccgattcagtggcagcgggtctgggacagatttcactctcaccatcagcagcctgcaggctgaagatgtggcagttttttactgtcaacaatattatagtactccgtggacgttcggccaagggaccaaggtggaaatcaaacgaacggtggctgcaccatctgtcttcatcttcccgccatctgatgagcagttgaaatctggaactgcctctgttgtgtgcctgctgaataacttctatcccagagaggccaaagtacagtggaaggtggataacgccctccaatcgggtaactcccaggagagtgtcacagagcaggacagcaaggacagcacctacagcctcagcagcaccctgacgctgagcaaagcagactacgagaaacacaaagtctacgcctgcgaagtcacccatcagggcctgagctcgcccgtcacaaagagcttcaacaggggagagtgt

SEQ ID NO: 1890 - DNA, 660 bp, synthetic construct
  misc_feature 1..660: note = source = /note="Description of Artificial Sequence: Synthetic polynucleotide"
  source 1..660: mol_type = other DNA
gacatcgtgatgacccagtctccagactccctggctgtgtctctgggcgagagggccaccatcaactgcaagtccagccagagtgttttatccagctccaacaataagaactacatagcttggtaccagcagaaaccaggacatcctcctaagctgctcatttactgggcatctacccgggaatccggggtccctgaccgattcagtggcagcgggtctgggacagatttcactctcaccatcagcagcctgcaggctgaagatgtggcagttttttactgtcaacaatattatagtactccgtggacgttcggccaagggaccaaggtggaaatcaaacgaacggtggctgcaccatctgtcttcatcttcccgccatctgatgagcagttgaaatctggaactgcctctgttgtgtgcctgctgaataacttctatcccagagaggccaaagtacagtggaaggtggataacgccctccaatcgggtaactcccaggagagtgtcacagagcaggacagcaaggacagcacctacagcctcagcagcaccctgacgctgagcaaagcagactacgagaaacacaaagtctacgcctgcgaagtcacccatcagggcctgagctcgcccgtcacaaagagcttcaacaggggagagtgt

SEQ ID NO: 1891 - DNA, 660 bp, synthetic construct
  misc_feature 1..660: note = source = /note="Description of Artificial Sequence: Synthetic polynucleotide"
  source 1..660: mol_type = other DNA
gacatcgtgatgacccagtctccagactccctgtctgtgtctctgggcgagagggccaccatcaactgcaagtccagccagagtgttttatccagctccaacaataagaactacttagcttggtaccaacagaaaccaggacagcctcctaacctgctcatttactggacttctacccgagattccggggtccctgaccgattcagtggcagcgggtctgggacagatttcactctcaccatcaacagcctgcaggctgaagatgtggctgtttattactgtcagcaatattatcgtactccgtggacgttcggccaagggaccaaggtggaaatcaaacgaacggtggctgcaccatctgtcttcatcttcccgccatctgatgagcagttgaaatctggaactgcctctgttgtgtgcctgctgaataacttctatcccagagaggccaaagtacagtggaaggtggataacgccctccaatcgggtaactcccaggagagtgtcacagagcaggacagcaaggacagcacctacagcctcagcagcaccctgacgctgagcaaagcagactacgagaaacacaaagtctacgcctgcgaagtcacccatcagggcctgagctcgcccgtcacaaagagcttcaacaggggagagtgt

SEQ ID NO: 1892 - DNA, 660 bp, synthetic construct
  misc_feature 1..660: note = source = /note="Description of Artificial Sequence: Synthetic polynucleotide"
  source 1..660: mol_type = other DNA
gacatcgtgatgacccagtctccagactccctgtctgtgtctctgggcgagagggccaccatcaactgcaagtccagccagagtgttttatccagctccaacaataagaactacttagcttggtaccagcagaaaccaggacagcctcctaacctgctcatttactggacttctacccgagattccggggtccctgaccgattcagtggcagcgggtctgggacagatttcactctcaccatcaacagcctgcaggctgaagatgtggctgtttattactgtcagcaatattatcgtactccgtggacgttcggccaagggaccaaggtggaaatcaaacgaacggtggctgcaccatctgtcttcatcttcccgccatctgatgagcagttgaaatctggaactgcctctgttgtgtgcctgctgaataacttctatcccagagaggccaaagtacagtggaaggtggataacgccctccaatcgggtaactcccaggagagtgtcacagagcaggacagcaaggacagcacctacagcctcagcagcaccctgacgctgagcaaagcagactacgagaaacacaaagtctacgcctgcgaagtcacccatcagggcctgagctcgcccgtcacaaagagcttcaacaggggagagtgt

SEQ ID NO: 1893 - DNA, 645 bp, synthetic construct
  misc_feature 1..645: note = source = /note="Description of Artificial Sequence: Synthetic polynucleotide"
  source 1..645: mol_type = other DNA
gaaattgtgttgacgcagtctccaggcaccctgtctttgtctccaggggaaagagccaccctctcctgcagggccagtcagagtattagttacagttacttagcctggtaccagcagaaacctggccaggctccccggctcctcatctatggtgcatccagcagggccactggcatcccagacaggttcagtggcagtgggtctgggacagacttcactctcaccatcagcagacaggagcctgatgattttgcagtgtattactgtcagcagtatggtagttcaccgctcactttcggcggagggaccaaggtggagatcaaacgaacggtggctgcaccatctgtcttcatcttcccgccatctgatgagcagttgaaatctggaactgcctctgttgtgtgcctgctgaataacttctatcccagagaggccaaagtacagtggaaggtggataacgccctccaatcgggtaactcccaggagagtgtcacagagcaggacagcaaggacagcacctacagcctcagcagcaccctgacgctgagcaaagcagactacgagaaacacaaagtctacgcctgcgaagtcacccatcagggcctgagctcgcccgtcacaaagagcttcaacaggggagagtgt

SEQ ID NO: 1894 - DNA, 642 bp, synthetic construct
  misc_feature 1..642: note = source = /note="Description of Artificial Sequence: Synthetic polynucleotide"
  source 1..642: mol_type = other DNA
gaaatagtgatgacgcagtctccagccaccctgtctgtgtctccaggggaaagagccaccctctcctgcagggccagtcagagtgttagcagcaacttagcctggtaccagcagaaacctggccaggctcccaggctcctcatctatggtgcagccaccagggccactggtatcccagccagggtcagtggcagtgggtctgggacagagttcactctcaccatcagcagcctgcagtctgaagattttgcagtttattactgtcagcagtataataactggcctctcactttcggcggagggaccaaggtggagatcaaacgaacggtggctgcaccatctgtcttcatcttcccgccatctgatgagcagttgaaatctggaactgcctctgttgtgtgcctgctgaataacttctatcccagagaggccaaagtacagtggaaggtggataacgccctccaatcgggtaactcccaggagagtgtcacagagcaggacagcaaggacagcacctacagcctcagcagcaccctgacgctgagcaaagcagactacgagaaacacaaagtctacgcctgcgaagtcacccatcagggcctgagctcgcccgtcacaaagagcttcaacaggggagagtgt

SEQ ID NO: 1895 - DNA, 642 bp, synthetic construct
  misc_feature 1..642: note = source = /note="Description of Artificial Sequence: Synthetic polynucleotide"
  source 1..642: mol_type = other DNA
gacattcagatgacccagtctccatcctccctgtctgcatctgtaggagacagagtcaccatcacttgccgggcaagtcagggcattagaaatgagttaggctggtatcagcagaaaccagggaaagcccctaaacgcctgatctatggtgcatccagtttgcaaagtggggtcccatcaaggttcagcggcagtggatctgggacagagttcactctcacaatcagcagcctgcagcctgaagattttgtaacttattactgtctacagcataatagttacccattcactttcggccctgggaccaaagtggatgtcaaacgaacggtggctgcaccatctgtcttcatcttcccgccatctgatgagcagttgaaatctggaactgcctctgttgtgtgcctgctgaataacttctatcccagagaggccaaagtacagtggaaggtggataacgccctccaatcgggtaactcccaggagagtgtcacagagcaggacagcaaggacagcacctacagcctcagcagcaccctgacgctgagcaaagcagactacgagaaacacaaagtctacgcctgcgaagtcacccatcagggcctgagctcgcccgtcacaaagagcttcaacaggggagagtgt

SEQ ID NO: 1896 - DNA, 639 bp, synthetic construct
  misc_feature 1..639: note = source = /note="Description of Artificial Sequence: Synthetic polynucleotide"
  source 1..639: mol_type = other DNA
gacatccagatgacccagtctccatcctccctgtctgcatctgtgggggacagagtcaccatcacttgccaggcgagtcaggacattaccaactatttaaattggtatcagcagaaaccagggaaagcccctaaactcctgatctacgatgcttccaatttggagccaggggtcccatcaaggttcagtggaagtggatctgggacagattttactttcaccatcagcagcctgcagcctgaagatattgcaacatattactgtcaacagtatgatgatctattcactttcggccctgggaccaaagtggatatcaaacgaacggtggctgcaccatctgtcttcatcttcccgccatctgatgagcagttgaaatctggaactgcctctgttgtgtgcctgctgaataacttctatcccagagaggccaaagtacagtggaaggtggataacgccctccaatcgggtaactcccaggagagtgtcacagagcaggacagcaaggacagcacctacagcctcagcagcaccctgacgctgagcaaagcagactacgagaaacacaaagtctacgcctgcgaagtcacccatcagggcctgagctcgcccgtcacaaagagcttcaacaggggagagtgt

SEQ ID NO: 1897 - DNA, 642 bp, synthetic construct
  misc_feature 1..642: note = source = /note="Description of Artificial Sequence: Synthetic polynucleotide"
  source 1..642: mol_type = other DNA
gacatccagatgacccagtctccatcttccgtgtctgcatctgtaggagacagagtcaccatcacttgtcgggcgagtcagggtcttatcatctggttagcctggtatcagcagaaaccggggaaagcccctaaactcctgatctatgctgcatccagtttgcaaagtggggtcccatcaaggttcagcggcagtggctctgggacagatttcactctcaccatcagcagcctacagcctgaagattttgcaacttactattgtcaacagactaacagtttccctccgacgttcggccaagggaccaaggtggaaatcaaacgaacggtggctgcaccatctgtcttcatcttcccgccatctgatgagcagttgaaatctggaactgcctctgttgtgtgcctgctgaataacttctatcccagagaggccaaagtacagtggaaggtggataacgccctccaatcgggtaactcccaggagagtgtcacagagcaggacagcaaggacagcacctacagcctcagcagcaccctgacgctgagcaaagcagactacgagaaacacaaagtctacgcctgcgaagtcacccatcagggcctgagctcgcccgtcacaaagagcttcaacaggggagagtgt

SEQ ID NO: 1898 - DNA, 642 bp, synthetic construct; identical to SEQ ID NO: 1897
  misc_feature 1..642: note = source = /note="Description of Artificial Sequence: Synthetic polynucleotide"
  source 1..642: mol_type = other DNA

SEQ ID NO: 1899 - DNA, 642 bp, synthetic construct
  misc_feature 1..642: note = source = /note="Description of Artificial Sequence: Synthetic polynucleotide"
  source 1..642: mol_type = other DNA
gacattcagatgacccagtctccatcctccctgtctgcatctgtaggagacagagtcaccatcacttgccgggcaagtcagggcattagaaatgagttaggctggtatcagcagaaaccagggaaagcccctaaactcctgatctatggtgcatccagtttgcaaagtggggtcccatcaaggttcagcggcagtggatctgggacagagttcactctcacaatcagcagcctgcagcctgaagattttgtaacttattactgtctacagcataatagttacccattcactttcggccaagggaccaaagtggatgtcaaacgaacggtggctgcaccatctgtcttcatcttcccgccatctgatgagcagttgaaatctggaactgcctctgttgtgtgcctgctgaataacttctatcccagagaggccaaagtacagtggaaggtggataacgccctccaatcgggtaactcccaggagagtgtcacagagcaggacagcaaggacagcacctacagcctcagcagcaccctgacgctgagcaaagcagactacgagaaacacaaagtctacgcctgcgaagtcacccatcagggcctgagctcgcccgtcacaaagagcttcaacaggggagagtgt

SEQ ID NO: 1900 - DNA, 642 bp, synthetic construct; identical to SEQ ID NO: 1899
  misc_feature 1..642: note = source = /note="Description of Artificial Sequence: Synthetic polynucleotide"
  source 1..642: mol_type = other DNA

SEQ ID NO: 1901 - DNA, 642 bp, synthetic construct; identical to SEQ ID NO: 1899
  misc_feature 1..642: note = source = /note="Description of Artificial Sequence: Synthetic polynucleotide"
  source 1..642: mol_type = other DNA

SEQ ID NO: 1902 - DNA, 642 bp, synthetic construct
  misc_feature 1..642: note = source = /note="Description of Artificial Sequence: Synthetic polynucleotide"
  source 1..642: mol_type = other DNA
gacattcagatgacccagtctccatcctccctgtctgcatctgtaggagacagagtcaccatcacttgccgggcaagtcagggcattagaaatgagttaggctggtatcagcagaaaccagggaaagcccctaaactcctgatctatggtgcatccagtttgcaaagtggggtcccatcaaggttcagcggcagtggatctgggacagagttcactctcacaatcagcagcctgcagcctgaagattttgtaacttattactgtctacagcataatagttacccattcactttcggccctgggaccaaagtggatgtcaaacgaacggtggctgcaccatctgtcttcatcttcccgccatctgatgagcagttgaaatctggaactgcctctgttgtgtgcctgctgaataacttctatcccagagaggccaaagtacagtggaaggtggataacgccctccaatcgggtaactcccaggagagtgtcacagagcaggacagcaaggacagcacctacagcctcagcagcaccctgacgctgagcaaagcagactacgagaaacacaaagtctacgcctgcgaagtcacccatcagggcctgagctcgcccgtcacaaagagcttcaacaggggagagtgt

SEQ ID NO: 1903 - DNA, 642 bp, synthetic construct
  misc_feature 1..642: note = source = /note="Description of Artificial Sequence: Synthetic polynucleotide"
  source 1..642: mol_type = other DNA
gacattcagatgacccagtctccatcctccctgtctgcatctgtaggagacagagtcaccatcacttgccgggcaagtcagggcattagaaatgagttaggctggtatcagcagaaaccagggaaagcccctaaacgcctgatctatggtgcatccagtttgcaaagtggggtcccatcaaggttcagcggcagtggatctgggacagagttcactctcacaatcagcagcctgcagcctgaagattttgtaacttattactgtctacagcataatagttacccattcactttcggccaagggaccaaagtggatgtcaaacgaacggtggctgcaccatctgtcttcatcttcccgccatctgatgagcagttgaaatctggaactgcctctgttgtgtgcctgctgaataacttctatcccagagaggccaaagtacagtggaaggtggataacgccctccaatcgggtaactcccaggagagtgtcacagagcaggacagcaaggacagcacctacagcctcagcagcaccctgacgctgagcaaagcagactacgagaaacacaaagtctacgcctgcgaagtcacccatcagggcctgagctcgcccgtcacaaagagcttcaacaggggagagtgt

SEQ ID NO: 1904 - DNA, 642 bp, synthetic construct; identical to SEQ ID NO: 1899
  misc_feature 1..642: note = source = /note="Description of Artificial Sequence: Synthetic polynucleotide"
  source 1..642: mol_type = other DNA

SEQ ID NO: 1905 - DNA, 642 bp, synthetic construct
  misc_feature 1..642: note = source = /note="Description of Artificial Sequence: Synthetic polynucleotide"
  source 1..642: mol_type = other DNA
gacatccagatgacccagtctccatcctccctgtctgcatctataggagacagagtcaccatcacttgccgggcaagtcaggacattagagattatttaggctggtatcagcagaaaccagggaaagcccctaagctcctgatctatggtgcatccagtttgcaaagtggggtcccttcaaggttcagcggcagtggatctgggacagaattcactctcacaatcagcagcctgcagcctgaagatttcgcaacttattactgtctacagcataataattaccccttcactttcggccaagggaccaaagtggatatcaaacgaacggtggctgcaccatctgtcttcatcttcccgccatctgatgagcagttgaaatctggaactgcctctgttgtgtgcctgctgaataacttctatcccagagaggccaaagtacagtggaaggtggataacgccctccaatcgggtaactcccaggagagtgtcacagagcaggacagcaaggacagcacctacagcctcagcagcaccctgacgctgagcaaagcagactacgagaaacacaaagtctacgcctgcgaagtcacccatcagggcctgagctcgcccgtcacaaagagcttcaacaggggagagtgt

SEQ ID NO: 1906 - DNA, 642 bp, synthetic construct
  misc_feature 1..642: note = source = /note="Description of Artificial Sequence: Synthetic polynucleotide"
  source 1..642: mol_type = other DNA
gacatccagatgacccagtctccatcctccctgtctgcatctataggagacagagtcaccatcacttgccgggcaagtcaggacattagagattatttaggctggtatcagcagaaaccagggaaagcccctaagcgcctgatctatggtgcatccagtttgcaaagtggggtcccttcaaggttcagcggcagtggatctgggacagaattcactctcacaatcagcagcctgcagcctgaagatttcgcaacttattactgtctacagcataataattaccccttcactttcggccaagggaccaaagtggatatcaaacgaacggtggctgcaccatctgtcttcatcttcccgccatctgatgagcagttgaaatctggaactgcctctgttgtgtgcctgctgaataacttctatcccagagaggccaaagtacagtggaaggtggataacgccctccaatcgggtaactcccaggagagtgtcacagagcaggacagcaaggacagcacctacagcctcagcagcaccctgacgctgagcaaagcagactacgagaaacacaaagtctacgcctgcgaagtcacccatcagggcctgagctcgcccgtcacaaagagcttcaacaggggagagtgt

SEQ ID NO: 1907 - DNA, 642 bp, synthetic construct
  misc_feature 1..642: note = source = /note="Description of Artificial Sequence: Synthetic polynucleotide"
  source 1..642: mol_type = other DNA
gacatccagatgacccagtctccatcctccctgtctgcatctataggagacagagtcaccatcacttgccgggcaagtcaggacattagagattatttaggctggtatcagcagaaaccagggaaagcccctaagctcctgatctatggtgcatccagtttgcaaagtggggtcccttcaaggttcagcggcagtggatctgggacagaattcactctcacaatcagcagcctgcagcctgaagatttcgcaacttattactgtctacagcataataattaccccttcactttcggccctgggaccaaagtggatatcaaacgaacggtggctgcaccatctgtcttcatcttcccgccatctgatgagcagttgaaatctggaactgcctctgttgtgtgcctgctgaataacttctatcccagagaggccaaagtacagtggaaggtggataacgccctccaatcgggtaactcccaggagagtgtcacagagcaggacagcaaggacagcacctacagcctcagcagcaccctgacgctgagcaaagcagactacgagaaacacaaagtctacgcctgcgaagtcacccatcagggcctgagctcgcccgtcacaaagagcttcaacaggggagagtgt

SEQ ID NO: 1908 - DNA, 642 bp, synthetic construct; identical to SEQ ID NO: 1905
  misc_feature 1..642: note = source = /note="Description of Artificial Sequence: Synthetic polynucleotide"
  source 1..642: mol_type = other DNA

SEQ ID NO: 1909 - DNA, 642 bp, synthetic construct; identical to SEQ ID NO: 1905
  misc_feature 1..642: note = source = /note="Description of Artificial Sequence: Synthetic polynucleotide"
  source 1..642: mol_type = other DNA

SEQ ID NO: 1910 - DNA, 642 bp, synthetic construct; identical to SEQ ID NO: 1905
  misc_feature 1..642: note = source = /note="Description of Artificial Sequence: Synthetic polynucleotide"
  source 1..642: mol_type = other DNA

SEQ ID NO: 1911 - DNA, 642 bp, synthetic construct; identical to SEQ ID NO: 1905
  misc_feature 1..642: note = source = /note="Description of Artificial Sequence: Synthetic polynucleotide"
  source 1..642: mol_type = other DNA

SEQ ID NO: 1912 - DNA, 642 bp, synthetic construct
  misc_feature 1..642: note = source = /note="Description of Artificial Sequence: Synthetic polynucleotide"
  source 1..642: mol_type = other DNA
gacatccagatgacccagtctccatcctccctgtctgcatctataggagacagagtcaccatcacttgccgggcaagtcaggaccttagaaattatttaggctggtatcaccagaaaccagggaaagcccctaagcgcctgatctatggtgcatccagtttgcaaagtggggtcccttcaaggttcagcggcagtggatctgggacagaattcactctcacaatcagcagcctgcagcctgaagatttcgcaacttattactgtctacagcataataattaccccttcactttcggccctgggaccaaagtggatatcaaacgaacggtggctgcaccatctgtcttcatcttcccgccatctgatgagcagttgaaatctggaactgcctctgttgtgtgcctgctgaataacttctatcccagagaggccaaagtacagtggaaggtggataacgccctccaatcgggtaactcccaggagagtgtcacagagcaggacagcaaggacagcacctacagcctcagcagcaccctgacgctgagcaaagcagactacgagaaacacaaagtctacgcctgcgaagtcacccatcagggcctgagctcgcccgtcacaaagagcttcaacaggggagagtgt

SEQ ID NO: 1913 - DNA, 642 bp, synthetic construct
  misc_feature 1..642: note = source = /note="Description of Artificial Sequence: Synthetic polynucleotide"
  source 1..642: mol_type = other DNA
gacatccagatgacccagtctccatcctccctgtctgcatctataggagacagagtcaccatcacttgccgggcaagtcaggaccttagaaattatttaggctggtatcaacagaaaccagggaaagcccctaagctcctgatctatggtgcatccagtttgcaaagtggggtcccttcaaggttcagcggcagtggatctgggacagaattcactctcacaatcagcagcctgcagcctgaagatttcgcaacttattactgtctacagcataataattaccccttcactttcggccctgggaccaaagtggatatcaaacgaacggtggctgcaccatctgtcttcatcttcccgccatctgatgagcagttgaaatctggaactgcctctgttgtgtgcctgctgaataacttctatcccagagaggccaaagtacagtggaaggtggataacgccctccaatcgggtaactcccaggagagtgtcacagagcaggacagcaaggacagcacctacagcctcagcagcaccctgacgctgagcaaagcagactacgagaaacacaaagtctacgcctgcgaagtcacccatcagggcctgagctcgcccgtcacaaagagcttcaacaggggagagtgt

SEQ ID NO: 1914 - DNA, 642 bp, synthetic construct; identical to SEQ ID NO: 1913
  misc_feature 1..642: note = source = /note="Description of Artificial Sequence: Synthetic polynucleotide"
  source 1..642: mol_type = other DNA

SEQ ID NO: 1915 - DNA, 642 bp, synthetic construct
  misc_feature 1..642: note = source = /note="Description of Artificial Sequence: Synthetic polynucleotide"
  source 1..642: mol_type = other DNA
gacatccagatgacccagtctccatcctccctgtctgcatctataggagacagagtcaccatcacttgccgggcaagtcaggaccttagaaattatttaggctggtatcaccagaaaccagggaaagcccctaagctcctgatctatggtgcatccagtttgcaaagtggggtcccttcaaggttcagcggcagtggatctgggacagaattcactctcacaatcagcagcctgcagcctgaagatttcgcaacttattactgtctacagcataataattaccccttcactttcggccctgggaccaaagtggatatcaaacgaacggtggctgcaccatctgtcttcatcttcccgccatctgatgagcagttgaaatctggaactgcctctgttgtgtgcctgctgaataacttctatcccagagaggccaaagtacagtggaaggtggataacgccctccaatcgggtaactcccaggagagtgtcacagagcaggacagcaaggacagcacctacagcctcagcagcaccctgacgctgagcaaagcagactacgagaaacacaaagtctacgcctgcgaagtcacccatcagggcctgagctcgcccgtcacaaagagcttcaacaggggagagtgt

SEQ ID NO: 1916 - DNA, 642 bp, synthetic construct
  misc_feature 1..642: note = source = /note="Description of Artificial Sequence: Synthetic polynucleotide"
  source 1..642: mol_type = other DNA
gacatccagatgacccagtctccatcctccctgtctgcatctataggagacagagtcaccatcacttgccgggcaagtcaggaccttagaaattatttaggctggtatcaacagaaaccagggaaagcccctaagcgcctgatctatggtgcatccagtttgcaaagtggggtcccttcaaggttcagcggcagtggatctgggacagaattcactctcacaatcagcagcctgcagcctgaagatttcgcaacttattactgtctacagcataataattaccccttcactttcggccctgggaccaaagtggatatcaaacgaacggtggctgcaccatctgtcttcatcttcccgccatctgatgagcagttgaaatctggaactgcctctgttgtgtgcctgctgaataacttctatcccagagaggccaaagtacagtggaaggtggataacgccctccaatcgggtaactcccaggagagtgtcacagagcaggacagcaaggacagcacctacagcctcagcagcaccctgacgctgagcaaagcagactacgagaaacacaaagtctacgcctgcgaagtcacccatcagggcctgagctcgcccgtcacaaagagcttcaacaggggagagtgt

SEQ ID NO: 1917 - DNA, 642 bp, synthetic construct; identical to SEQ ID NO: 1916
  misc_feature 1..642: note = source = /note="Description of Artificial Sequence: Synthetic polynucleotide"
  source 1..642: mol_type = other DNA

SEQ ID NO: 1918 - DNA, 642 bp, synthetic construct; identical to SEQ ID NO: 1915
  misc_feature 1..642: note = source = /note="Description of Artificial Sequence: Synthetic polynucleotide"
  source 1..642: mol_type = other DNA

SEQ ID NO: 1919 - DNA, 642 bp, synthetic construct; identical to SEQ ID NO: 1912
  misc_feature 1..642: note = source = /note="Description of Artificial Sequence: Synthetic polynucleotide"
  source 1..642: mol_type = other DNA

SEQ ID NO: 1920 - DNA, 642 bp, synthetic construct; identical to SEQ ID NO: 1913
  misc_feature 1..642: note = source = /note="Description of Artificial Sequence: Synthetic polynucleotide"
  source 1..642: mol_type = other DNA

SEQ ID NO: 1921 - DNA, 642 bp, synthetic construct; identical to SEQ ID NO: 1913
  misc_feature 1..642: note = source = /note="Description of Artificial Sequence: Synthetic polynucleotide"
  source 1..642: mol_type = other DNA

SEQ ID NO: 1922 - DNA, 642 bp, synthetic construct
  misc_feature 1..642: note = source = /note="Description of Artificial Sequence: Synthetic polynucleotide"
  source 1..642: mol_type = other DNA
gacatccagatgacccagtctccatcctccctgtctgcatctataggagacagagtcaccatcacttgccgggcaagtcaggaccttagaaattatttaggctggtatcaacagaaaccagggaaagcccctaagctcctgatctatggtgcatccagtttgcaaagtggggtcccttcaaggttcagcggcagtggatctgggacagaattcactctcacaatcagcagcctgcagcctgaagatttcgcaacttattactgtctacagcataataattaccccttcactttcggccaagggaccaaagtggatatcaaacgaacggtggctgcaccatctgtcttcatcttcccgccatctgatgagcagttgaaatctggaactgcctctgttgtgtgcctgctgaataacttctatcccagagaggccaaagtacagtggaaggtggataacgccctccaatcgggtaactcccaggagagtgtcacagagcaggacagcaaggacagcacctacagcctcagcagcaccctgacgctgagcaaagcagactacgagaaacacaaagtctacgcctgcgaagtcacccatcagggcctgagctcgcccgtcacaaagagcttcaacaggggagagtgt

SEQ ID NO: 1923 - DNA, 642 bp, synthetic construct; identical to SEQ ID NO: 1913
  misc_feature 1..642: note = source = /note="Description of Artificial Sequence: Synthetic polynucleotide"
  source 1..642: mol_type = other DNA

SEQ ID NO: 1924 - DNA, 639 bp, synthetic construct
  misc_feature 1..639: note = source = /note="Description of Artificial Sequence: Synthetic polynucleotide"
  source 1..639: mol_type = other DNA
gacatccagatgacccagtctccatcctccctgtctgcatctgtaggagacagagtcaccatcacttgccaggcgagtcaggacattagcaactatttaaattggtatcagcagaaaccagggaaagcccctaagctcctgatctacgatgcatccaatttggaaacaggggtcccatcaaggttcagtggaagtggatctgggacagattttagtctcaccatcagcagcctgcagcctgaagattttgcaacatattactgtcaacagtatgatattctcctcactttcggcggagggaccaaggtggagatcaagcgaacggtggctgcaccatctgtcttcatcttcccgccatctgatgagcagttgaaatctggaactgcctctgttgtgtgcctgctgaataacttctatcccagagaggccaaagtacagtggaaggtggataacgccctccaatcgggtaactcccaggagagtgtcacagagcaggacagcaaggacagcacctacagcctcagcagcaccctgacgctgagcaaagcagactacgagaaacacaaagtctacgcctgcgaagtcacccatcagggcctgagctcgcccgtcacaaagagcttcaacaggggagagtgt

SEQ ID NO: 1925 - DNA, 639 bp, synthetic construct; identical to SEQ ID NO: 1924
  misc_feature 1..639: note = source = /note="Description of Artificial Sequence: Synthetic polynucleotide"
  source 1..639: mol_type = other DNA

SEQ ID NO: 1926 - DNA, 639 bp, synthetic construct
  misc_feature 1..639: note = source = /note="Description of Artificial Sequence: Synthetic polynucleotide"
  source 1..639: mol_type = other DNA
gacatccagatgacccagtctccatcctccctgtctgcatctgtaggagacagagtcaccatcacttgccaggcgagtcaggacattagcaactatttaaattggtatcagcagaaaccagggaaagcccctaagctcctgatctacgatgcatccaatttggaaacaggggtcccatcaaggttcagtggaagtggatctgggacagattttagtctcaccatcagcagcctgcagcctgaagatattgcaacatattactgtcaacagtatgatattctcctcactttcggcggagggaccaaggtggagatcaagcgaacggtggctgcaccatctgtcttcatcttcccgccatctgatgagcagttgaaatctggaactgcctctgttgtgtgcctgctgaataacttctatcccagagaggccaaagtacagtggaaggtggataacgccctccaatcgggtaactcccaggagagtgtcacagagcaggacagcaaggacagcacctacagcctcagcagcaccctgacgctgagcaaagcagactacgagaaacacaaagtctacgcctgcgaagtcacccatcagggcctgagctcgcccgtcacaaagagcttcaacaggggagagtgt

SEQ ID NO: 1927 - DNA, 639 bp, synthetic construct
  misc_feature 1..639: note = source = /note="Description of Artificial Sequence: Synthetic polynucleotide"
  source 1..639: mol_type = other DNA
gacatccagatgacccagtctccatcctccctgtctgcatctgtaggagacagagtcaccatcacttgccaggcgagtcaggacattagcaactatttaaattggtatcagcagaaaccagggaaagcccctaagctcctgatctacgatgcatccaatttggaaacaggggtcccatcaaggttcagtggaagtggatctgggacagattttagtttcaccatcagcagcctgcagcctgaagattttgcaacatattactgtcaacagtatgatattctcctcactttcggcggagggaccaaggtggagatcaagcgaacggtggctgcaccatctgtcttcatcttcccgccatctgatgagcagttgaaatctggaactgcctctgttgtgtgcctgctgaataacttctatcccagagaggccaaagtacagtggaaggtggataacgccctccaatcgggtaactcccaggagagtgtcacagagcaggacagcaaggacagcacctacagcctcagcagcaccctgacgctgagcaaagcagactacgagaaacacaaagtctacgcctgcgaagtcacccatcagggcctgagctcgcccgtcacaaagagcttcaacaggggagagtgt

SEQ ID NO: 1928 - DNA, 639 bp, synthetic construct; identical to SEQ ID NO: 1926
  misc_feature 1..639: note = source = /note="Description of Artificial Sequence: Synthetic polynucleotide"
  source 1..639: mol_type = other DNA

SEQ ID NO: 1929 - DNA, 639 bp, synthetic construct; identical to SEQ ID NO: 1927
  misc_feature 1..639: note = source = /note="Description of Artificial Sequence: Synthetic polynucleotide"
  source 1..639: mol_type = other DNA

SEQ ID NO: 1930 - DNA, 639 bp, synthetic construct; identical to SEQ ID NO: 1888
  misc_feature 1..639: note = source = /note="Description of Artificial Sequence: Synthetic polynucleotide"
  source 1..639: mol_type = other DNA

SEQ ID NO: 1931 - DNA, 639 bp, synthetic construct; identical to SEQ ID NO: 1924
  misc_feature 1..639: note = source = /note="Description of Artificial Sequence: Synthetic polynucleotide"
  source 1..639: mol_type = other DNA

SEQ ID NO: 1932 - DNA, 639 bp, synthetic construct; identical to SEQ ID NO: 1924
  misc_feature 1..639: note = source = /note="Description of Artificial Sequence: Synthetic polynucleotide"
  source 1..639: mol_type = other DNA

SEQ ID NO: 1933 - DNA, 642 bp, synthetic construct; identical to SEQ ID NO: 1886
  misc_feature 1..642: note = source = /note="Description of Artificial Sequence: Synthetic polynucleotide"
  source 1..642: mol_type = other DNA

SEQ ID NO: 1934 - DNA, 642 bp, synthetic construct; identical to SEQ ID NO: 1886
  misc_feature 1..642: note = source = /note="Description of Artificial Sequence: Synthetic polynucleotide"
  source 1..642: mol_type = other DNA

SEQ ID NO: 1935 - DNA, 642 bp, synthetic construct; identical to SEQ ID NO: 1905
  misc_feature 1..642: note = source = /note="Description of Artificial Sequence: Synthetic polynucleotide"
  source 1..642: mol_type = other DNA

SEQ ID NO: 1936 - DNA, 642 bp, synthetic construct; identical to SEQ ID NO: 1905
  misc_feature 1..642: note = source = /note="Description of Artificial Sequence: Synthetic polynucleotide"
  source 1..642: mol_type = other DNA

SEQ ID NO: 1937 - DNA, 642 bp, synthetic construct; identical to SEQ ID NO: 1907
  misc_feature 1..642: note = source = /note="Description of Artificial Sequence: Synthetic polynucleotide"
  source 1..642: mol_type = other DNA

SEQ ID NO: 1938 - DNA, 642 bp, synthetic construct; identical to SEQ ID NO: 1907
  misc_feature 1..642: note = source = /note="Description of Artificial Sequence: Synthetic polynucleotide"
  source 1..642: mol_type = other DNA

SEQ ID NO: 1939 - DNA, 642 bp, synthetic construct; identical to SEQ ID NO: 1907
  misc_feature 1..642: note = source = /note="Description of Artificial Sequence: Synthetic polynucleotide"
  source 1..642: mol_type = other DNA

SEQ ID NO: 1940 - DNA, 639 bp, synthetic construct
  misc_feature 1..639: note = source = /note="Description of Artificial Sequence: Synthetic polynucleotide"
  source 1..639: mol_type = other DNA
gacatccagatgacccagtctccatcctccctgtctgcatctgtgggggacagagtcaccatcacttgccaggcgagtcaggacattaccaactatttaaattggtatcagcagaaaccagggaaagcccctaaactcctgatctacgatgcttccaatttggagccaggggtcccatcaaggttcagtggaagtggatctgggacagattttactctcaccatcagcagcctgcagcctgaagattttgcaacatattactgtcaacagtatgatgatctattcactttcggccctgggaccaaagtggatatcaaacgaacggtggctgcaccatctgtcttcatcttcccgccatctgatgagcagttgaaatctggaactgcctctgttgtgtgcctgctgaataacttctatcccagagaggccaaagtacagtggaaggtggataacgccctccaatcgggtaactcccaggagagtgtcacagagcaggacagcaaggacagcacctacagcctcagcagcaccctgacgctgagcaaagcagactacgagaaacacaaagtctacgcctgcgaagtcacccatcagggcctgagctcgcccgtcacaaagagcttcaacaggggagagtgt

SEQ ID NO: 1941 - DNA, 639 bp, synthetic construct
  misc_feature 1..639: note = source = /note="Description of Artificial Sequence: Synthetic polynucleotide"
  source 1..639: mol_type = other DNA
gacatccagatgacccagtctccatcctccctgtctgcatctgtgggggacagagtcaccatcacttgccaggcgagtcaggacattaccaactatttaaattggtatcagcagaaaccagggaaagcccctaaactcctgatctacgatgcttccaatttggagccaggggtcccatcaaggttcagtggaagtggatctgggacagattttactctcaccatcagcagcctgcagcctgaagatattgcaacatattactgtcaacagtatgatgatctattcactttcggccctgggaccaaagtggatatcaaacgaacggtggctgcaccatctgtcttcatcttcccgccatctgatgagcagttgaaatctggaactgcctctgttgtgtgcctgctgaataacttctatcccagagaggccaaagtacagtggaaggtggataacgccctccaatcgggtaactcccaggagagtgtcacagagcaggacagcaaggacagcacctacagcctcagcagcaccctgacgctgagcaaagcagactacgagaaacacaaagtctacgcctgcgaagtcacccatcagggcctgagctcgcccgtcacaaagagcttcaacaggggagagtgt

SEQ ID NO: 1942 - DNA, 639 bp, synthetic construct; identical to SEQ ID NO: 1940
  misc_feature 1..639: note = source = /note="Description of Artificial Sequence: Synthetic polynucleotide"
  source 1..639: mol_type = other DNA

SEQ ID NO: 1943 - DNA, 639 bp, synthetic construct
  misc_feature 1..639: note = source = /note="Description of Artificial Sequence: Synthetic polynucleotide"
  source 1..639: mol_type = other DNA
gacatccagatgacccagtctccatcctccctgtctgcatctgtgggggacagagtcaccatcacttgccaggcgagtcaggacattaccaactatttaaattggtatcagcagaaaccagggaaagcccctaaactcctgatctacgatgcttccaatttggagccaggggtcccatcaaggttcagtggaagtggatctgggacagattttactttcaccatcagcagcctgcagcctgaagattttgcaacatattactgtcaacagtatgatgatctattcactttcggccctgggaccaaagtggatatcaaacgaacggtggctgcaccatctgtcttcatcttcccgccatctgatgagcagttgaaatctggaactgcctctgttgtgtgcctgctgaataacttctatcccagagaggccaaagtacagtggaaggtggataacgccctccaatcgggtaactcccaggagagtgtcacagagcaggacagcaaggacagcacctacagcctcagcagcaccctgacgctgagcaaagcagactacgagaaacacaaagtctacgcctgcgaagtcacccatcagggcctgagctcgcccgtcacaaagagcttcaacaggggagagtgt

SEQ ID NO: 1944 - DNA, 639 bp, synthetic construct; identical to SEQ ID NO: 1941
  misc_feature 1..639: note = source = /note="Description of Artificial Sequence: Synthetic polynucleotide"
  source 1..639: mol_type = other DNA

SEQ ID NO: 1945 - DNA, 639 bp, synthetic construct; identical to SEQ ID NO: 1943
  misc_feature 1..639: note = source = /note="Description of Artificial Sequence: Synthetic polynucleotide"
  source 1..639: mol_type = other DNA

SEQ ID NO: 1946 - DNA, 639 bp, synthetic construct; identical to SEQ ID NO: 1896
  misc_feature 1..639: note = source = /note="Description of Artificial Sequence: Synthetic polynucleotide"
  source 1..639: mol_type = other DNA

SEQ ID NO: 1947 - DNA, 639 bp, synthetic construct; identical to SEQ ID NO: 1940
  misc_feature 1..639: note = source = /note="Description of Artificial Sequence: Synthetic polynucleotide"
  source 1..639: mol_type = other DNA

SEQ ID NO: 1948 - DNA, 639 bp, synthetic construct; identical to SEQ ID NO: 1940
  misc_feature 1..639: note = source = /note="Description of Artificial Sequence: Synthetic polynucleotide"
  source 1..639: mol_type = other DNA

SEQ ID NO: 1949 - DNA, 639 bp, synthetic construct
  misc_feature 1..639: note = source = /note="Description of Artificial Sequence: Synthetic polynucleotide"
  source 1..639: mol_type = other DNA
gacatccagatgacccagtctccatcctccctgtctgcatctgtgggggacagagtcaccatcacttgccaggcgagtcaggacattaccaactatttaaattggtatcagcagaaaccagggaaagcccctaaactcctgatctacgatgcttccaatttggagccaggggtcccatcaaggttcagtggaagtggatctgggacagattttactctcaccatcagcagcctgcagcctgaagattttgcaacatattactgtcaacagtatgatgatctattcactttcggccaagggaccaaagtggatatcaaacgaacggtggctgcaccatctgtcttcatcttcccgccatctgatgagcagttgaaatctggaactgcctctgttgtgtgcctgctgaataacttctatcccagagaggccaaagtacagtggaaggtggataacgccctccaatcgggtaactcccaggagagtgtcacagagcaggacagcaaggacagcacctacagcctcagcagcaccctgacgctgagcaaagcagactacgagaaacacaaagtctacgcctgcgaagtcacccatcagggcctgagctcgcccgtcacaaagagcttcaacaggggagagtgt

SEQ ID NO: 1950 - DNA, 639 bp, synthetic construct; identical to SEQ ID NO: 1949
  misc_feature 1..639: note = source = /note="Description of Artificial Sequence: Synthetic polynucleotide"
  source 1..639: mol_type = other DNA

SEQ ID NO: 1951 - DNA, 642 bp, synthetic construct
  misc_feature 1..642: note = source = /note="Description of Artificial Sequence: Synthetic polynucleotide"
  source 1..642: mol_type = other DNA
gaaattgtgttgacgcagtctccaggcaccctgtctttgtctccaggggaaagagccaccctctcctgcagggccagtcagatttttaccagcacctacttagcctggtaccagcagaaacctggccaggctcccaggctcctcatctatggtgcatccagcagggccactggcatcccagacaggttcagtggcagtgggtctgggacagacttcactctcaccatcagcagattggagcctgaagattttgcagtgtattactgtcagcagtatggtagctcacctcgcttcggccaagggacacgactggagattaaacgaacggtggctgcaccatctgtcttcatcttcccgccatctgatgagcagttgaaatctggaactgcctctgttgtgtgcctgctgaataacttctatcccagagaggccaaagtacagtggaaggtggataacgccctccaatcgggtaactcccaggagagtgtcacagagcaggacagcaaggacagcacctacagcctcagcagcaccctgacgctgagcaaagcagactacgagaaacacaaagtctacgcctgcgaagtcacccatcagggcctgagctcgcccgtcacaaagagcttcaacaggggagagtgt

SEQ ID NO: 1952 - DNA, 642 bp, synthetic construct; identical to SEQ ID NO: 1951
  misc_feature 1..642: note = source = /note="Description of Artificial Sequence: Synthetic polynucleotide"
  source 1..642: mol_type = other DNA

SEQ ID NO: 1953 - DNA, 642 bp, synthetic construct; identical to SEQ ID NO: 1951
  misc_feature 1..642: note = source = /note="Description of Artificial Sequence: Synthetic polynucleotide"
  source 1..642: mol_type = other DNA

SEQ ID NO: 1954 - DNA, 642 bp, synthetic construct; identical to SEQ ID NO: 1951
  misc_feature 1..642: note = source = /note="Description of Artificial Sequence: Synthetic polynucleotide"
  source 1..642: mol_type = other DNA

SEQ ID NO: 1955 - DNA, 642 bp, synthetic construct
  misc_feature 1..642: note = source = /note="Description of Artificial Sequence: Synthetic polynucleotide"
  source 1..642: mol_type = other DNA
gaaatagtgatgacgcagtctccagccaccctgtctgtgtctccaggggaaagagccaccctctcctgcagggccagtcagagtgttagcagcaacttagcctggtaccagcagaaacctggccaggctcccaggctcctcatctatggtgcagccaccagggccactggtatcccagccaggttcagtggcagtgggtctgggacagagttcactctcaccatcagcagcctgcagtctgaagattttgcagtttattactgtcagcagtataataactggcctctcactttcggcggagggaccaaggtggagatcaaacgaacggtggctgcaccatctgtcttcatcttcccgccatctgatgagcagttgaaatctggaactgcctctgttgtgtgcctgctgaataacttctatcccagagaggccaaagtacagtggaaggtggataacgccctccaatcgggtaactcccaggagagtgtcacagagcaggacagcaaggacagcacctacagcctcagcagcaccctgacgctgagcaaagcagactacgagaaacacaaagtctacgcctgcgaagtcacccatcagggcctgagctcgcccgtcacaaagagcttcaacaggggagagtgt

SEQ ID NO: 1956 - DNA, 642 bp, synthetic construct; identical to SEQ ID NO: 1955
  misc_feature 1..642: note = source = /note="Description of Artificial Sequence: Synthetic polynucleotide"
  source 1..642: mol_type = other DNA

SEQ ID NO: 1957 - DNA, 642 bp, synthetic construct; identical to SEQ ID NO: 1955
  misc_feature 1..642: note = source = /note="Description of Artificial Sequence: Synthetic polynucleotide"
  source 1..642: mol_type = other DNA

SEQ ID NO: 1958 - DNA, 642 bp, synthetic construct; identical to SEQ ID NO: 1894
  misc_feature 1..642: note = source = /note="Description of Artificial Sequence: Synthetic polynucleotide"
  source 1..642: mol_type = other DNA

SEQ ID NO: 1959 - DNA, 642 bp, synthetic construct
  misc_feature 1..642: note = source = /note="Description of Artificial Sequence: Synthetic polynucleotide"
  source 1..642: mol_type = other DNA
gaaatagtgatgacgcagtctccagccaccctgtctgtgtctccaggggaaagagccaccctctcctgcagggccagtcagagtgttagcagcaacttagcctggtaccagcagaaacctggccaggctcccaggctcctcatctatggtgcagccaccagggccactggtatcccagccaggttcagtggcagtgggtctgggacagagttcactctcaccatcagcagcctggagcctgaagattttgcagtttattactgtcagcagtataataacttccctctcactttcggcggagggaccaaggtggagatcaaacgaacggtggctgcaccatctgtcttcatcttcccgccatctgatgagcagttgaaatctggaactgcctctgttgtgtgcctgctgaataacttctatcccagagaggccaaagtacagtggaaggtggataacgccctccaatcgggtaactcccaggagagtgtcacagagcaggacagcaaggacagcacctacagcctcagcagcaccctgacgctgagcaaagcagactacgagaaacacaaagtctacgcctgcgaagtcacccatcagggcctgagctcgcccgtcacaaagagcttcaacaggggagagtgt

SEQ ID NO: 1960 - DNA, 642 bp, synthetic construct
  misc_feature 1..642: note = source = /note="Description of Artificial Sequence: Synthetic polynucleotide"
  source 1..642: mol_type = other DNA
gaaatagtgatgacgcagtctccagccaccctgtctgtgtctccaggggaaagagccaccctctcctgcagggccagtcagagtgttagcagcaacttagcctggtaccagcagaaacctggccaggctcccaggctcctcatctatggtgcagccaccagggccactggtatcccagccaggttcagtggcagtgggtctgggacagagttcactctcaccatcagcagcctggagcctgaagattttgcagtttattactgtcagcagtataataactatcctctcactttcggcggagggaccaaggtggagatcaaacgaacggtggctgcaccatctgtcttcatcttcccgccatctgatgagcagttgaaatctggaactgcctctgttgtgtgcctgctgaataacttctatcccagagaggccaaagtacagtggaaggtggataacgccctccaatcgggtaactcccaggagagtgtcacagagcaggacagcaaggacagcacctacagcctcagcagcaccctgacgctgagcaaagcagactacgagaaacacaaagtctacgcctgcgaagtcacccatcagggcctgagctcgcccgtcacaaagagcttcaacaggggagagtgt

SEQ ID NO: 1961 - DNA, 642 bp, synthetic construct
  misc_feature 1..642: note = source = /note="Description of Artificial Sequence: Synthetic polynucleotide"
  source 1..642: mol_type = other DNA
gaaatagtgatgacgcagtctccagccaccctgtctgtgtctccaggggaaagagccaccctctcctgcagggccagtcagagtgttagcagcaacttagcctggtaccagcagaaacctggccaggctcccaggctcctcatctatggtgcagccaccagggccactggtatcccagccaggttcagtggcagtgggtctgggacagagttcactctcaccatcagcagcctggagcctgaagattttgcagtttattactgtcagcagtataataactggcctctcactttcggcggagggaccaaggtggagatcaaacgaacggtggctgcaccatctgtcttcatcttcccgccatctgatgagcagttgaaatctggaactgcctctgttgtgtgcctgctgaataacttctatcccagagaggccaaagtacagtggaaggtggataacgccctccaatcgggtaactcccaggagagtgtcacagagcaggacagcaaggacagcacctacagcctcagcagcaccctgacgctgagcaaagcagactacgagaaacacaaagtctacgcctgcgaagtcacccatcagggcctgagctcgcccgtcacaaagagcttcaacaggggagagtgt

SEQ ID NO: 1962 - DNA, 642 bp, synthetic construct; identical to SEQ ID NO: 1961
  misc_feature 1..642: note = source = /note="Description of Artificial Sequence: Synthetic polynucleotide"
  source 1..642: mol_type = other DNA

SEQ ID NO: 1963 - DNA, 645 bp, synthetic construct
  misc_feature 1..645: note = source = /note="Description of Artificial Sequence: Synthetic polynucleotide"
  source 1..645: mol_type = other DNA
gaaattgtgttgacgcagtctccaggcaccctgtctttgtctccaggggaaagagccaccctctcctgcagggccagtcagagtattagttacagttacttagcctggtaccagcagaaacctggccaggctccccggctcctcatctatggtgcatccagcagggccactggcatcccagacaggttcagtggcagtgggtctgggacagacttcactctcaccatcagcagactggagcctgatgattttgcagtgtattactgtcagcagtatggtagttcaccgctcactttcggcggagggaccaaggtggagatcaaacgaacggtggctgcaccatctgtcttcatcttcccgccatctgatgagcagttgaaatctggaactgcctctgttgtgtgcctgctgaataacttctatcccagagaggccaaagtacagtggaaggtggataacgccctccaatcgggtaactcccaggagagtgtcacagagcaggacagcaaggacagcacctacagcctcagcagcaccctgacgctgagcaaagcagactacgagaaacacaaagtctacgcctgcgaagtcacccatcagggcctgagctcgcccgtcacaaagagcttcaacaggggagagtgt

SEQ ID NO: 1964 - DNA, 645 bp, synthetic construct; identical to SEQ ID NO: 1893
  misc_feature 1..645: note = source = /note="Description of Artificial Sequence: Synthetic polynucleotide"
  source 1..645: mol_type = other DNA

SEQ ID NO: 1965 - DNA, 645 bp, synthetic construct; identical to SEQ ID NO: 1963
  misc_feature 1..645: note = source = /note="Description of Artificial Sequence: Synthetic polynucleotide"
  source 1..645: mol_type = other DNA

SEQ ID NO: 1966 - DNA, 645 bp, synthetic construct; identical to SEQ ID NO: 1963
  misc_feature 1..645: note = source = /note="Description of Artificial Sequence: Synthetic polynucleotide"
  source 1..645: mol_type = other DNA

SEQ ID NO: 1967 - DNA, 645 bp, synthetic construct; identical to SEQ ID NO: 1963
  misc_feature 1..645: note = source = /note="Description of Artificial Sequence: Synthetic polynucleotide"
  source 1..645: mol_type = other DNA

SEQ ID NO: 1968 - DNA, 645 bp, synthetic construct; identical to SEQ ID NO: 1893
  misc_feature 1..645: note = source = /note="Description of Artificial Sequence: Synthetic polynucleotide"
  source 1..645: mol_type = other DNA

SEQ ID NO: 1969 - DNA, 645 bp, synthetic construct; identical to SEQ ID NO: 1893
  misc_feature 1..645: note = source = /note="Description of Artificial Sequence: Synthetic polynucleotide"
  source 1..645: mol_type = other DNA

SEQ ID NO: 1970 - DNA, 660 bp, synthetic construct; identical to SEQ ID NO: 1889
  misc_feature 1..660: note = source = /note="Description of Artificial Sequence: Synthetic polynucleotide"
  source 1..660: mol_type = other DNA

SEQ ID NO: 1971 - DNA, 660 bp, synthetic construct; identical to SEQ ID NO: 1889
  misc_feature 1..660: note = source = /note="Description of Artificial Sequence: Synthetic polynucleotide"
  source 1..660: mol_type = other DNA

SEQ ID NO: 1972 - DNA, 660 bp, synthetic construct; identical to SEQ ID NO: 1889
  misc_feature 1..660: note = source = /note="Description of Artificial Sequence: Synthetic polynucleotide"
  source 1..660: mol_type = other DNA

SEQ ID NO: 1973 - DNA, 660 bp, synthetic construct; identical to SEQ ID NO: 1889
  misc_feature 1..660: note = source = /note="Description of Artificial Sequence: Synthetic polynucleotide"
  source 1..660: mol_type = other DNA

SEQ ID NO: 1974 - DNA, 660 bp, synthetic construct; identical to SEQ ID NO: 1889
  misc_feature 1..660: note = source = /note="Description of Artificial Sequence: Synthetic polynucleotide"
  source 1..660: mol_type = other DNA

SEQ ID NO: 1975 - DNA, 660 bp, synthetic construct; identical to SEQ ID NO: 1889
  misc_feature 1..660: note = source = /note="Description of Artificial Sequence: Synthetic polynucleotide"
  source 1..660: mol_type = other DNA

SEQ ID NO: 1976 - DNA, 660 bp, synthetic construct; identical to SEQ ID NO: 1889
  misc_feature 1..660: note = source = /note="Description of Artificial Sequence: Synthetic polynucleotide"
  source 1..660: mol_type = other DNA

SEQ ID NO: 1977 - DNA, 660 bp, synthetic construct; identical to SEQ ID NO: 1889
  misc_feature 1..660: note = source = /note="Description of Artificial Sequence: Synthetic polynucleotide"
  source 1..660: mol_type = other DNA

SEQ ID NO: 1978 - DNA, 660 bp, synthetic construct; identical to SEQ ID NO: 1889
  misc_feature 1..660: note = source = /note="Description of Artificial Sequence: Synthetic polynucleotide"
  source 1..660: mol_type = other DNA

SEQ ID NO: 1979 - DNA, 660 bp, synthetic construct
  misc_feature 1..660: note = source = /note="Description of Artificial Sequence: Synthetic polynucleotide"
  source 1..660: mol_type = other DNA
gacatcgtgatgacccagtctccagactccctggctgtgtctctgggcgagagggccaccatcaactgcaagtccagccagagtgttttatccagctccaacaataagaactacatagcttggtaccagcagaaaccaggacaacctcctaagctgctcatttactgggcatctacccgggaatccggggtccctgaccgattcagtggcagcgggtctgggacagatttcactctcaccatcagcagcctgcaggctgaagatgtggcagttttttactgtcaacaatattatagtactccgtggacgttcggccaagggaccaaggtggaaatcaaacgaacggtggctgcaccatctgtcttcatcttcccgccatctgatgagcagttgaaatctggaactgcctctgttgtgtgcctgctgaataacttctatcccagagaggccaaagtacagtggaaggtggataacgccctccaatcgggtaactcccaggagagtgtcacagagcaggacagcaaggacagcacctacagcctcagcagcaccctgacgctgagcaaagcagactacgagaaacacaaagtctacgcctgcgaagtcacccatcagggcctgagctcgcccgtcacaaagagcttcaacaggggagagtgt

SEQ ID NO: 1980 - DNA, 660 bp, synthetic construct; identical to SEQ ID NO: 1979
  misc_feature 1..660: note = source = /note="Description of Artificial Sequence: Synthetic polynucleotide"
  source 1..660: mol_type = other DNA

SEQ ID NO: 1981 - DNA, 660 bp, synthetic construct
  misc_feature 1..660: note = source = /note="Description of Artificial Sequence: Synthetic polynucleotide"
  source 1..660: mol_type = other DNA
gacatcgtgatgacccagtctccagactccctgtctgtgtctctgggcgagagggccaccatcaactgcaagtccagccagagtgttttatccagctccaacaataagaactacttagcttggtaccaacagaaaccaggacagcctcctaacctgctcatttactggacttctacccgagaatccggggtccctgaccgattcagtggcagcgggtctgggacagatttcactctcaccatcaacagcctgcaggctgaagatgtggctgtttattactgtcagcaatattatcgtactccgtggacgttcggccaagggaccaaggtggaaatcaaacgaacggtggctgcaccatctgtcttcatcttcccgccatctgatgagcagttgaaatctggaactgcctctgttgtgtgcctgctgaataacttctatcccagagaggccaaagtacagtggaaggtggataacgccctccaatcgggtaactcccaggagagtgtcacagagcaggacagcaaggacagcacctacagcctcagcagcaccctgacgctgagcaaagcagactacgagaaacacaaagtctacgcctgcgaagtcacccatcagggcctgagctcgcccgtcacaaagagcttcaacaggggagagtgt

SEQ ID NO: 1982 - DNA, 660 bp, synthetic construct; identical to SEQ ID NO: 1981
  misc_feature 1..660: note = source = /note="Description of Artificial Sequence: Synthetic polynucleotide"
  source 1..660: mol_type = other DNA

SEQ ID NO: 1983 - DNA, 660 bp, synthetic construct; identical to SEQ ID NO: 1891
  misc_feature 1..660: note = source = /note="Description of Artificial Sequence: Synthetic polynucleotide"
  source 1..660: mol_type = other DNA

SEQ ID NO: 1984 - DNA, 660 bp, synthetic construct; identical to SEQ ID NO: 1981
  misc_feature 1..660: note = source = /note="Description of Artificial Sequence: Synthetic polynucleotide"
  source 1..660: mol_type = other DNA

SEQ ID NO: 1985 - DNA, 660 bp, synthetic construct; identical to SEQ ID NO: 1981
  misc_feature 1..660: note = source = /note="Description of Artificial Sequence: Synthetic polynucleotide"
  source 1..660: mol_type = other DNA

SEQ ID NO: 1986 - DNA, 660 bp, synthetic construct; identical to SEQ ID NO: 1891
  misc_feature 1..660: note = source = /note="Description of Artificial Sequence: Synthetic polynucleotide"
  source 1..660: mol_type = other DNA

SEQ ID NO: 1987 - DNA, 660 bp, synthetic construct; identical to SEQ ID NO: 1891
  misc_feature 1..660: note = source = /note="Description of Artificial Sequence: Synthetic polynucleotide"
  source 1..660: mol_type = other DNA

SEQ ID NO: 1988 - DNA, 660 bp, synthetic construct
  misc_feature 1..660: note = source = /note="Description of Artificial Sequence: Synthetic polynucleotide"
  source 1..660: mol_type = other DNA
gacatcgtgatgacccagtctccagactccctggctgtgtctctgggcgagagggccaccatcaactgcaagtccagccagagtgttttatccagctccaacaataagaactacttagcttggtaccaacagaaaccaggacagcctcctaaactgctcatttactggacttctacccgagaatccggggtccctgaccgattcagtggcagcgggtctgggacagatttcactctcaccatcaacagcctgcaggctgaagatgtggctgtttattactgtcagcaatattatcgtactccgtggacgttcggccaagggaccaaggtggaaatcaaacgaacggtggctgcaccatctgtcttcatcttcccgccatctgatgagcagttgaaatctggaactgcctctgttgtgtgcctgctgaataacttctatcccagagaggccaaagtacagtggaaggtggataacgccctccaatcgggtaactcccaggagagtgtcacagagcaggacagcaaggacagcacctacagcctcagcagcaccctgacgctgagcaaagcagactacgagaaacacaaagtctacgcctgcgaagtcacccatcagggcctgagctcgcccgtcacaaagagcttcaacaggggagagtgt

SEQ ID NO: 1989 - DNA, 660 bp, synthetic construct; identical to SEQ ID NO: 1981
  misc_feature 1..660: note = source = /note="Description of Artificial Sequence: Synthetic polynucleotide"
  source 1..660: mol_type = other DNA

SEQ ID NO: 1990 - DNA, 660 bp, synthetic construct; identical to SEQ ID NO: 1890
  misc_feature 1..660: note = source = /note="Description of Artificial Sequence: Synthetic polynucleotide"
  source 1..660: mol_type = other DNA

SEQ ID NO: 1991 - DNA, 660 bp, synthetic construct; identical to SEQ ID NO: 1890
  misc_feature 1..660: note = source = /note="Description of Artificial Sequence: Synthetic polynucleotide"
  source 1..660: mol_type = other DNA

SEQ ID NO: 1992 - DNA, 660 bp, synthetic construct; identical to SEQ ID NO: 1890
  misc_feature 1..660: note = source = /note="Description of Artificial Sequence: Synthetic polynucleotide"
  source 1..660: mol_type = other DNA

SEQ ID NO: 1993 - DNA, 660 bp, synthetic construct; identical to SEQ ID NO: 1979
  misc_feature 1..660: note = source = /note="Description of Artificial Sequence: Synthetic polynucleotide"
  source 1..660: mol_type = other DNA

SEQ ID NO: 1994 - DNA, 660 bp, synthetic construct; identical to SEQ ID NO: 1979
  misc_feature 1..660: note = source = /note="Description of Artificial Sequence: Synthetic polynucleotide"
  source 1..660: mol_type = other DNA

SEQ ID NO: 1995 - DNA, 660 bp, synthetic construct; identical to SEQ ID NO: 1892
  misc_feature 1..660: note = source = /note="Description of Artificial Sequence: Synthetic polynucleotide"
  source 1..660: mol_type = other DNA

SEQ ID NO: 1996 - DNA, 660 bp, synthetic construct; identical to SEQ ID NO: 1892
  misc_feature 1..660: note = source = /note="Description of Artificial Sequence: Synthetic polynucleotide"
  source 1..660: mol_type = other DNA

SEQ ID NO: 1997 - DNA, 660 bp, synthetic construct; identical to SEQ ID NO: 1892
  misc_feature 1..660: note = source = /note="Description of Artificial Sequence: Synthetic polynucleotide"
  source 1..660: mol_type = other DNA

SEQ ID NO: 1998 - DNA, 660 bp, synthetic construct; identical to SEQ ID NO: 1892
  misc_feature 1..660: note = source = /note="Description of Artificial Sequence: Synthetic polynucleotide"
  source 1..660: mol_type = other DNA

SEQ ID NO: 1999 - DNA, 660 bp, synthetic construct; identical to SEQ ID NO: 1892
  misc_feature 1..660: note = source = /note="Description of Artificial Sequence: Synthetic polynucleotide"
  source 1..660: mol_type = other DNA

SEQ ID NO: 2000 - DNA, 660 bp, synthetic construct; identical to SEQ ID NO: 1892
  misc_feature 1..660: note = source = /note="Description of Artificial Sequence: Synthetic polynucleotide"
  source 1..660: mol_type = other DNA

SEQ ID NO: 2001 - DNA, 660 bp, synthetic construct; identical to SEQ ID NO: 1892
  misc_feature 1..660: note = source = /note="Description of Artificial Sequence: Synthetic polynucleotide"
  source 1..660: mol_type = other DNA

SEQ ID NO: 2002 - DNA, 660 bp, synthetic construct
  misc_feature 1..660: note = source = /note="Description of Artificial Sequence: Synthetic polynucleotide"
  source 1..660: mol_type = other DNA
gacatcgtgatgacccagtctccagactccctgtctgtgtctctgggcgagagggccaccatcaactgcaagtccagccagagtgttttatccagctccaacaataagaactacttagcttggtaccagcagaaaccaggacagcctcctaacctgctcatttactggacttctacccgagaatccggggtccctgaccgattcagtggcagcgggtctgggacagatttcactctcaccatcaacagcctgcaggctgaagatgtggctgtttattactgtcagcaatattatcgtactccgtggacgttcggccaagggaccaaggtggaaatcaaacgaacggtggctgcaccatctgtcttcatcttcccgccatctgatgagcagttgaaatctggaactgcctctgttgtgtgcctgctgaataacttctatcccagagaggccaaagtacagtggaaggtggataacgccctccaatcgggtaactcccaggagagtgtcacagagcaggacagcaaggacagcacctacagcctcagcagcaccctgacgctgagcaaagcagactacgagaaacacaaagtctacgcctgcgaagtcacccatcagggcctgagctcgcccgtcacaaagagcttcaacaggggagagtgt

SEQ ID NO: 2003 - DNA, 660 bp, synthetic construct; identical to SEQ ID NO: 2002
  misc_feature 1..660: note = source = /note="Description of Artificial Sequence: Synthetic polynucleotide"
  source 1..660: mol_type = other DNA

SEQ ID NO: 2004 - DNA, 660 bp, synthetic construct; identical to SEQ ID NO: 2002
  misc_feature 1..660: note = source = /note="Description of Artificial Sequence: Synthetic polynucleotide"
  source 1..660: mol_type = other DNA

SEQ ID NO: 2005 - DNA, 660 bp, synthetic construct; identical to SEQ ID NO: 2002
  misc_feature 1..660: note = source = /note="Description of Artificial Sequence: Synthetic polynucleotide"
  source 1..660: mol_type = other DNA

SEQ ID NO: 2006 - DNA, 660 bp, synthetic construct
  misc_feature 1..660: note = source = /note="Description of Artificial Sequence: Synthetic polynucleotide"
  source 1..660: mol_type = other DNA
gacatcgtgatgacccagtctccagactccctggctgtgtctctgggcgagagggccaccatcaactgcaagtccagccagagtgttttatccagctccaacaataagaactacttagcttggtaccagcagaaaccaggacagcctcctaaactgctcatttactggacttctacccgagattccggggtccctgaccgattcagtggcagcgggtctgggacagatttcactctcaccatcaacagcctgcaggctgaagatgtggctgtttattactgtcagcaatattatcgtactccgtggacgttcggccaagggaccaaggtggaaatcaaacgaacggtggctgcaccatctgtcttcatcttcccgccatctgatgagcagttgaaatctggaactgcctctgttgtgtgcctgctgaataacttctatcccagagaggccaaagtacagtggaaggtggataacgccctccaatcgggtaactcccaggagagtgtcacagagcaggacagcaaggacagcacctacagcctcagcagcaccctgacgctgagcaaagcagactacgagaaacacaaagtctacgcctgcgaagtcacccatcagggcctgagctcgcccgtcacaaagagcttcaacaggggagagtgt

SEQ ID NO: 2007 - DNA, 660 bp, synthetic construct
  misc_feature 1..660: note = source = /note="Description of Artificial Sequence: Synthetic polynucleotide"
  source 1..660: mol_type = other DNA
gacatcgtgatgacccagtctccagactccctggctgtgtctctgggcgagagggccaccatcaactgcaagtccagccagagtgttttatccagctccaacaataagaactacttagcttggtaccagcagaaaccaggacagcctcctaaactgctcatttactggacttctacccgagaatccggggtccctgaccgattcagtggcagcgggtctgggacagatttcactctcaccatcaacagcctgcaggctgaagatgtggctgtttattactgtcagcaatattatcgtactccgtggacgttcggccaagggaccaaggtggaaatcaaacgaacggtggctgcaccatctgtcttcatcttcccgccatctgatgagcagttgaaatctggaactgcctctgttgtgtgcctgctgaataacttctatcccagagaggccaaagtacagtggaaggtggataacgccctccaatcgggtaactcccaggagagtgtcacagagcaggacagcaaggacagcacctacagcctcagcagcaccctgacgctgagcaaagcagactacgagaaacacaaagtctacgcctgcgaagtcacccatcagggcctgagctcgcccgtcacaaagagcttcaacaggggagagtgt

SEQ ID NO: 2008 - DNA, 648 bp, synthetic construct
  misc_feature 1..648: note = source = /note="Description of Artificial Sequence: Synthetic polynucleotide"
  source 1..648: mol_type = other DNA
cagtctgtgctgactcagccaccctcagcgtctgggacccccgggcagagggtcaccatctcttgttctggaagtagctccaacatcggaagtcaaactgtaaactggtaccagcacctcccaggaacggcccccaaactcctcatctatactaataatcagcggccctcaggggtccctgaccgattctctggctccaagtctggcacctcagcctcccttgccatcagtgggctccagtctgaggatgaggctgattatttctgtgcaacattcgatgaaagcctgagtggtccggtattcggcggagggaccaagctgaccgtcctaggtcagcccaaggctgccccctcggtcactctgttcccgccctcctctgaggagcttcaagccaacaaggccacactggtgtgtctcataagtgacttctacccgggagccgtgacagtggcctggaaggcagatagcagccccgtcaaggcgggagtggagaccaccacaccctccaaacaaagcaacaacaagtacgcggccagcagctatctgagcctgacgcctgagcagtggaagtcccacagaagctacagctgccaggtcacgcatgaagggagcaccgtggagaagacagtggcccctacagaatgttca

SEQ ID NO: 2009 - DNA, 648 bp, synthetic construct
  misc_feature 1..648: note = source = /note="Description of Artificial Sequence: Synthetic polynucleotide"
  source 1..648: mol_type = other DNA
cagtctgtgctgactcagccaccctcagcgtctgggacccccgggcagagggtcaccatctcttgttctggaagtagctccaacatcggaagtcaaactgtaaactggtaccagcacctcccaggaacggcccccaaactcctcatctatactaataatcagcggccctcaggggtccctgaccgattctctggctccaagtctggcacctcagcctcccttgccatcagtgggctccagtctgaggatgaggctgattatttctgtgcaacattcgatgaaagcctgcaaggtccggtattcggcggagggaccaagctgaccgtcctaggtcagcccaaggctgccccctcggtcactctgttcccgccctcctctgaggagcttcaagccaacaaggccacactggtgtgtctcataagtgacttctacccgggagccgtgacagtggcctggaaggcagatagcagccccgtcaaggcgggagtggagaccaccacaccctccaaacaaagcaacaacaagtacgcggccagcagctatctgagcctgacgcctgagcagtggaagtcccacagaagctacagctgccaggtcacgcatgaagggagcaccgtggagaagacagtggcccctacagaatgttca

SEQ ID NO: 2010 - DNA, 648 bp, synthetic construct
  misc_feature 1..648: note = source = /note="Description of Artificial Sequence: Synthetic polynucleotide"
  source 1..648: mol_type = other DNA
cagtctgtgctgactcagccaccctcagcgtctgggacccccgggcagagggtcaccatctcttgttctggaagtagctccaacatcggaagtaattatgtaaactggtaccagcacctcccaggaacggcccccaaactcctcatctatactaataatcagcggccctcaggggtccctgaccgattctctggctccaagtctggcacctcagcctcccttgccatcagtgggctccagtctgaggatgaggctgattatttctgtgcaacattcgatgaaagcctgagtggtccggtattcggcggagggaccaagctgaccgtcctaggtcagcccaaggctgccccctcggtcactctgttcccgccctcctctgaggagcttcaagccaacaaggccacactggtgtgtctcataagtgacttctacccgggagccgtgacagtggcctggaaggcagatagcagccccgtcaaggcgggagtggagaccaccacaccctccaaacaaagcaacaacaagtacgcggccagcagctatctgagcctgacgcctgagcagtggaagtcccacagaagctacagctgccaggtcacgcatgaagggagcaccgtggagaagacagtggcccctacagaatgttca

SEQ ID NO: 2011 - DNA, 648 bp, synthetic construct
  misc_feature 1..648: note = source = /note="Description of Artificial Sequence: Synthetic polynucleotide"
  source 1..648: mol_type = other DNA
cagtctgtgctgactcagccaccctcagcgtctgggacccccgggcagagggtcaccatctcttgttctggaagtagctccaacatcggaagtaattatgtaaactggtaccagcacctcccaggaacggcccccaaactcctcatctatactaataatcagcggccctcaggggtccctgaccgattctctggctccaagtctggcacctcagcctcccttgccatcagtgggctccagtctgaggatgaggctgattatttctgtgcaacattcgatgaaagcctgcaaggtccggtattcggcggagggaccaagctgaccgtcctaggtcagcccaaggctgccccctcggtcactctgttcccgccctcctctgaggagcttcaagccaacaaggccacactggtgtgtctcataagtgacttctacccgggagccgtgacagtggcctggaaggcagatagcagccccgtcaaggcgggagtggagaccaccacaccctccaaacaaagcaacaacaagtacgcggccagcagctatctgagcctgacgcctgagcagtggaagtcccacagaagctacagctgccaggtcacgcatgaagggagcaccgtggagaagacagtggcccctacagaatgttca

SEQ ID NO: 2012 - DNA, 648 bp, synthetic construct
  misc_feature 1..648: note = source = /note="Description of Artificial Sequence: Synthetic polynucleotide"
  source 1..648: mol_type = other DNA
cagtctgtgctgactcagccaccctcagcgtctgggacccccgggcagagggtcaccatctcttgttctggaagtagctccaacatcggaagtcaaactgtaaactggtaccagcacctcccaggaacggcccccaaactcctcatctatactaataatcagcggccctcaggggtccctgaccgattctctggctccaagtctggcacctcagcctcccttgccatcagtgggctccagtctgaggatgaggctgattatttctgtgcaacattcgatgacagcctgaatggtccggtattcggcggagggaccaagctgaccgtcctaggtcagcccaaggctgccccctcggtcactctgttcccgccctcctctgaggagcttcaagccaacaaggccacactggtgtgtctcataagtgacttctacccgggagccgtgacagtggcctggaaggcagatagcagccccgtcaaggcgggagtggagaccaccacaccctccaaacaaagcaacaacaagtacgcggccagcagctatctgagcctgacgcctgagcagtggaagtcccacagaagctacagctgccaggtcacgcatgaagggagcaccgtggagaagacagtggcccctacagaatgttca

SEQ ID NO: 2013 - DNA, 648 bp, synthetic construct
  misc_feature 1..648: note = source = /note="Description of Artificial Sequence: Synthetic polynucleotide"
  source 1..648: mol_type = other DNA
cagtctgtgctgactcagccaccctcagcgtctgggacccccgggcagagggtcaccatctcttgttctggaagtagctccaacatcggaagtaattatgtaaactggtaccagcacctcccaggaacggcccccaaactcctcatctatactaataatcagcggccctcaggggtccctgaccgattctctggctccaagtctggcacctcagcctcccttgccatcagtgggctccagtctgaggatgaggctgattatttctgtgcaacattcgatgacagcctgaatggtccggtattcggcggagggaccaagctgaccgtcctaggtcagcccaaggctgccccctcggtcactctgttcccgccctcctctgaggagcttcaagccaacaaggccacactggtgtgtctcataagtgacttctacccgggagccgtgacagtggcctggaaggcagatagcagccccgtcaaggcgggagtggagaccaccacaccctccaaacaaagcaacaacaagtacgcggccagcagctatctgagcctgacgcctgagcagtggaagtcccacagaagctacagctgccaggtcacgcatgaagggagcaccgtggagaagacagtggcccctacagaatgttca

SEQ ID NO: 2014 - DNA, 648 bp, synthetic construct
  misc_feature 1..648: note = source = /note="Description of Artificial Sequence: Synthetic polynucleotide"
  source 1..648: mol_type = other DNA
cagtctgtgctgactcagccaccctcagcgtctgggacccccgggcagagggtcaccatctcttgttctggaagtagctccaacatcggaagtaatactgtaaactggtaccagcacctcccaggaacggcccccaaactcctcatctatactaataatcagcggccctcaggggtccctgaccgattctctggctccaagtctggcacctcagcctcccttgccatcagtgggctccagtctgaggatgaggctgattatttctgtgcaacattcgatgaaagcctgaatggtccggtattcggcggagggaccaagctgaccgtcctaggtcagcccaaggctgccccctcggtcactctgttcccgccctcctctgaggagcttcaagccaacaaggccacactggtgtgtctcataagtgacttctacccgggagccgtgacagtggcctggaaggcagatagcagccccgtcaaggcgggagtggagaccaccacaccctccaaacaaagcaacaacaagtacgcggccagcagctatctgagcctgacgcctgagcagtggaagtcccacagaagctacagctgccaggtcacgcatgaagggagcaccgtggagaagacagtggcccctacagaatgttca

SEQ ID NO: 2015 - DNA, 648 bp, synthetic construct
  misc_feature 1..648: note = source = /note="Description of Artificial Sequence: Synthetic polynucleotide"
  source 1..648: mol_type = other DNA
cagtctgtgctgactcagccaccctcagcgtctgggacccccgggcagagggtcaccatctcttgttctggaagtagctccaacatcggaagtaatactgtaaactggtaccagcacctcccaggaacggcccccaaactcctcatctatactaataatcagcggccctcaggggtccctgaccgattctctggctccaagtctggcacctcagcctcccttgccatcagtgggctccagtctgaggatgaggctgattatttctgtgcaacattcgatgacagcctgcaaggtccggtattcggcggagggaccaagctgaccgtcctaggtcagcccaaggctgccccctcggtcactctgttcccgccctcctctgaggagcttcaagccaacaaggccacactggtgtgtctcataagtgacttctacccgggagccgtgacagtggcctggaaggcagatagcagccccgtcaaggcgggagtggagaccaccacaccctccaaacaaagcaacaacaagtacgcggccagcagctatctgagcctgacgcctgagcagtggaagtcccacagaagctacagctgccaggtcacgcatgaagggagcaccgtggagaagacagtggcccctacagaatgttca

SEQ ID NO: 2016 - DNA, 648 bp, synthetic construct
  misc_feature 1..648: note = source = /note="Description of Artificial Sequence: Synthetic polynucleotide"
  source 1..648: mol_type = other DNA
cagtctgtgctgactcagccaccctcagcgtctgggacccccgggcagagggtcaccatctcttgttctggaagtagctccaacatcggaagtaatactgtaaactggtaccagcacctcccaggaacggcccccaaactcctcatctatactaataatcagcggccctcaggggtccctgaccgattctctggctccaagtctggcacctcagcctcccttgccatcagtgggctccagtctgaggatgaggctgattatttctgtgcaacattcgatgacagcctgagtggtccggtattcggcggagggaccaagctgaccgtcctaggtcagcccaaggctgccccctcggtcactctgttcccgccctcctctgaggagcttcaagccaacaaggccacactggtgtgtctcataagtgacttctacccgggagccgtgacagtggcctggaaggcagatagcagccccgtcaaggcgggagtggagaccaccacaccctccaaacaaagcaacaacaagtacgcggccagcagctatctgagcctgacgcctgagcagtggaagtcccacagaagctacagctgccaggtcacgcatgaagggagcaccgtggagaagacagtggcccctacagaatgttca

SEQ ID NO: 2017 - DNA, 648 bp, synthetic construct
  misc_feature 1..648: note = source = /note="Description of Artificial Sequence: Synthetic polynucleotide"
  source 1..648: mol_type = other DNA
cagtctgtgctgactcagccaccctcagcgtctgggacccccgggcagagggtcaccatctcttgttctggaagtagctccaacatcggaagtaatactgtaaactggtaccagcacctcccaggaacggcccccaaactcctcatctatactaataatcagcggccctcaggggtccctgaccgattctctggctccaagtctggcacctcagcctcccttgccatcagtgggctccagtctgaggatgaggctgattatttctgtgcaacattcgatgacagcctgaatgctccggtattcggcggagggaccaagctgaccgtcctaggtcagcccaaggctgccccctcggtcactctgttcccgccctcctctgaggagcttcaagccaacaaggccacactggtgtgtctcataagtgacttctacccgggagccgtgacagtggcctggaaggcagatagcagccccgtcaaggcgggagtggagaccaccacaccctccaaacaaagcaacaacaagtacgcggccagcagctatctgagcctgacgcctgagcagtggaagtcccacagaagctacagctgccaggtcacgcatgaagggagcaccgtggagaagacagtggcccctacagaatgttca

SEQ ID NO: 2018 - DNA, 648 bp, synthetic construct
  misc_feature 1..648: note = source = /note="Description of Artificial Sequence: Synthetic polynucleotide"
  source 1..648: mol_type = other DNA
cagtctgtgctgactcagccaccctcagcgtctgggacccccgggcagagggtcaccatctcttgttctggaagtagctccaacatcggaagtaatactgtaaactggtaccagcacctcccaggaacggcccccaaactcctcatctatactaataatcagcggccctcaggggtccctgaccgattctctggctccaagtctggcacctcagcctcccttgccatcagtgggctccagtctgaggatgaggctgattatttctgtgcaacattcgatagcagcctgaatggtccggtattcggcggagggaccaagctgaccgtcctaggtcagcccaaggctgccccctcggtcactctgttcccgccctcctctgaggagcttcaagccaacaaggccacactggtgtgtctcataagtgacttctacccgggagccgtgacagtggcctggaaggcagatagcagccccgtcaaggcgggagtggagaccaccacaccctccaaacaaagcaacaacaagtacgcggccagcagctatctgagcctgacgcctgagcagtggaagtcccacagaagctacagctgccaggtcacgcatgaagggagcaccgtggagaagacagtggcccctacagaatgttca

SEQ ID NO: 2019 - DNA, 648 bp, synthetic construct
  misc_feature 1..648: note = source = /note="Description of Artificial Sequence: Synthetic polynucleotide"
  source 1..648: mol_type = other DNA
cagtctgtgctgactcagccaccctcagcgtctgggacccccgggcagagggtcaccatctcttgttctggaagtagctccaacatcggaagtaattatgtaaactggtaccagcacctcccaggaacggcccccaaactcctcatctatactaataatcagcggccctcaggggtccctgaccgattctctggctccaagtctggcacctcagcctcccttgccatcagtgggctccagtctgaggatgaggctgattatttctgtgcaacattcgatagcagcctgaatgctccggtattcggcggagggaccaagctgaccgtcctaggtcagcccaaggctgccccctcggtcactctgttcccgccctcctctgaggagcttcaagccaacaaggccacactggtgtgtctcataagtgacttctacccgggagccgtgacagtggcctggaaggcagatagcagccccgtcaaggcgggagtggagaccaccacaccctccaaacaaagcaacaacaagtacgcggccagcagctatctgagcctgacgcctgagcagtggaagtcccacagaagctacagctgccaggtcacgcatgaagggagcaccgtggagaagacagtggcccctacagaatgttca

SEQ ID NO: 2020 - DNA, 648 bp, synthetic construct; identical to SEQ ID NO: 2019
  misc_feature 1..648: note = source = /note="Description of Artificial Sequence: Synthetic polynucleotide"
  source 1..648: mol_type = other DNA

SEQ ID NO: 2021 - DNA, 648 bp, synthetic construct; identical to SEQ ID NO: 2008
  misc_feature 1..648: note = source = /note="Description of Artificial Sequence: Synthetic polynucleotide"
  source 1..648: mol_type = other DNA

SEQ ID NO: 2022 - DNA, 642 bp, synthetic construct
  misc_feature 1..642: note = source = /note="Description of Artificial Sequence: Synthetic polynucleotide"
  source 1..642: mol_type = other DNA
gacatccagatgacccagtctccatcctccctgtctgcatctataggagacagagtcaccatcacttgccgggcaagtcaggaccttagaaattatttaggctggtatcaacagaaaccagggaaagcccctaagcgcctgatctatggtgcatccagtttgcaaagtggggtcccttcaaggttcagcggcagtggatctgggacagaattcactctcacaatcagcagcctgcagcctgaagatttcgcaacttattactgtctacagcataataattaccccttcactttcggccaagggaccaaagtggatatcaaacgaacggtggctgcaccatctgtcttcatcttcccgccatctgatgagcagttgaaatctggaactgcctctgttgtgtgcctgctgaataacttctatcccagagaggccaaagtacagtggaaggtggataacgccctccaatcgggtaactcccaggagagtgtcacagagcaggacagcaaggacagcacctacagcctcagcagcaccctgacgctgagcaaagcagactacgagaaacacaaagtctacgcctgcgaagtcacccatcagggcctgagctcgcccgtcacaaagagcttcaacaggggagagtgt

SEQ ID NO: 2023 - DNA, 642 bp, synthetic construct; identical to SEQ ID NO: 1906
  misc_feature 1..642: note = source = /note="Description of Artificial Sequence: Synthetic polynucleotide"
  source 1..642: mol_type = other DNA

SEQ ID NO: 2024 - DNA, 648 bp, synthetic construct
  misc_feature 1..648: note = source = /note="Description of Artificial Sequence: Synthetic polynucleotide"
  source 1..648: mol_type = other DNA
cagtctgtgctgactcagccaccctcagcgtctgggacccccgggcagagggtcaccatctcttgttctggaagtagctccaacatcggaagtaatactgtaaactggtaccagcaactcccaggaacggcccccaaactcctcatctatactaataatcagcggccctcaggggtccctgaccgattctctggctccaagtctggcacctcagcctcccttgccatcagtgggctccagtctgaggatgaggctgattatttctgtgcaacattcgatagcagcctgagtggtccggtattcggcggagggaccaagctgaccgtcctaggtcagcccaaggctgccccctcggtcactctgttcccgccctcctctgaggagcttcaagccaacaaggccacactggtgtgtctcataagtgacttctacccgggagccgtgacagtggcctggaaggcagatagcagccccgtcaaggcgggagtggagaccaccacaccctccaaacaaagcaacaacaagtacgcggccagcagctatctgagcctgacgcctgagcagtggaagtcccacagaagctacagctgccaggtcacgcatgaagggagcaccgtggagaagacagtggcccctacagaatgttca

SEQ ID NO: 2025 - DNA, 642 bp, synthetic construct
  misc_feature 1..642: note = source = /note="Description of Artificial Sequence: Synthetic polynucleotide"
  source 1..642: mol_type = other DNA
gacatccagctgacccagtctccatcctccctgtctgcatctgtaggagacagagtcactatcacttgccgggcaagtcagaccattagcaggtttttaaattggtatcagcagaaacctgggaaagcccctgagctcctgatctatgttgcatccagtttgcaaagtggggtcccatcaagattcagtggcagtggttctgggacagatttcactctcaccatcagcagtctgcaacctgaagattttgcaacttactactgtcaacagagttacagtaccctgatcagttttggccaggggaccaagctggagatcacacgaacggtggctgcaccatctgtcttcatcttcccgccatctgatgagcagttgaaatctggaactgcctctgttgtgtgcctgctgaataacttctatcccagagaggccaaagtacagtggaaggtggataacgccctccaatcgggtaactcccaggagagtgtcacagagcaggacagcaaggacagcacctacagcctcagcagcaccctgacgctgagcaaagcagactacgagaaacacaaagtctacgcctgcgaagtcacccatcagggcctgagctcgcccgtcacaaagagcttcaacaggggagagtgt

SEQ ID NO: 2026 - DNA, 648 bp, synthetic construct
  misc_feature 1..648: note = source = /note="Description of Artificial Sequence: Synthetic polynucleotide"
  source 1..648: mol_type = other DNA
cagtctgtgttgacgcagccgccctcagtgtctgcggccccaggacagaaggtcaccatctcctgctctggaagcagctccaacattggaaataattatgtatcctggtatgagcagttcccaggaacagcccccaaactcctcatttatgacaataataagcgaccctcagggattcctgaccgattctctggctccaagtctggcacgtcagccaccctgggcatcaccggactccagactggggacgaggccgattattactgcggaacatgggatagcagcctgagtgctgtggtattcggcggagggaccaaactgaccgtcctaggtcagcccaaggctgccccctcggtcactctgttcccgccctcctctgaggagcttcaagccaacaaggccacactggtgtgtctcataagtgacttctacccgggagccgtgacagtggcctggaaggcagatagcagccccgtcaaggcgggagtggagaccaccacaccctccaaacaaagcaacaacaagtacgcggccagcagctatctgagcctgacgcctgagcagtggaagtcccacagaagctacagctgccaggtcacgcatgaagggagcaccgtggagaagacagtggcccctacagaatgttca

SEQ ID NO: 2027 - DNA, 642 bp, synthetic construct
  misc_feature 1..642: note = source = /note="Description of Artificial Sequence: Synthetic polynucleotide"
  source 1..642: mol_type = other DNA
gacatccagctgacccagtctccatcctccctgtctgcatctgtaggagacagagtcactatcacttgccgggcaagtcagaccattagcaggtttttaaattggtatcagcagaaacctgggaaagcccctgagctcctgatctatgttgcatccagtttgcaaagtggggtcccatcaagattcagtggcagtggttctgggacagatttcactctcaccatcagcagtctgcaacctgaagattttgcaacttactactgtcaacagagttacagtaccctgatcagttttggccaggggaccaagctggagatcaaacgaacggtggctgcaccatctgtcttcatcttcccgccatctgatgagcagttgaaatctggaactgcctctgttgtgtgcctgctgaataacttctatcccagagaggccaaagtacagtggaaggtggataacgccctccaatcgggtaactcccaggagagtgtcacagagcaggacagcaaggacagcacctacagcctcagcagcaccctgacgctgagcaaagcagactacgagaaacacaaagtctacgcctgcgaagtcacccatcagggcctgagctcgcccgtcacaaagagcttcaacaggggagagtgt

SEQ ID NO: 2028 - DNA, 642 bp, synthetic construct; identical to SEQ ID NO: 2027
  misc_feature 1..642: note = source = /note="Description of Artificial Sequence: Synthetic polynucleotide"
  source 1..642: mol_type = other DNA

SEQ ID NO: 2029 - DNA, 642 bp, synthetic construct; identical to SEQ ID NO: 2025
  misc_feature 1..642: note = source = /note="Description of Artificial Sequence: Synthetic polynucleotide"
  source 1..642: mol_type = other DNA

SEQ ID NO: 2030 - DNA, 642 bp, synthetic construct
  misc_feature 1..642: note = source = /note="Description of Artificial Sequence: Synthetic polynucleotide"
  source 1..642: mol_type = other DNA
gacatccagctgacccagtctccatcctccctgtctgcatctgtaggagacagagtcactatcacttgccgggcaagtcagaccattagcaggtttttaaattggtatcagcagaaacctgggaaagcccctaagctcctgatctatgttgcatccagtttgcaaagtggggtcccatcaagattcagtggcagtggttctgggacagatttcactctcaccatcagcagtctgcaacctgaagattttgcaacttactactgtcaacagagttacagtaccctgatcagttttggccaggggaccaagctggagatcaaacgaacggtggctgcaccatctgtcttcatcttcccgccatctgatgagcagttgaaatctggaactgcctctgttgtgtgcctgctgaataacttctatcccagagaggccaaagtacagtggaaggtggataacgccctccaatcgggtaactcccaggagagtgtcacagagcaggacagcaaggacagcacctacagcctcagcagcaccctgacgctgagcaaagcagactacgagaaacacaaagtctacgcctgcgaagtcacccatcagggcctgagctcgcccgtcacaaagagcttcaacaggggagagtgt

SEQ ID NO: 2031 - DNA, 642 bp, synthetic construct; identical to SEQ ID NO: 2027
  misc_feature 1..642: note = source = /note="Description of Artificial Sequence: Synthetic polynucleotide"
  source 1..642: mol_type = other DNA

SEQ ID NO: 2032 - DNA, 642 bp, synthetic construct; identical to SEQ ID NO: 2027
  misc_feature 1..642: note = source = /note="Description of Artificial Sequence: Synthetic polynucleotide"
  source 1..642: mol_type = other DNA

SEQ ID NO: 2033 - DNA, 648 bp, synthetic construct
  misc_feature 1..648: note = source = /note="Description of Artificial Sequence: Synthetic polynucleotide"
  source 1..648: mol_type = other DNA
cagtctgtgttgacgcagccgccctcagtgtctgcggccccaggacagaaggtcaccatctcctgctctggaagcagctccaacattggaaataattatgtatcctggtatcagcagctcccaggaacagcccccaaactcctcatttatgacaataataagcgaccctcagggattcctgaccgattctctggctccaagtctggcacgtcagccaccctgggcatcaccggactccagactggggacgaggccgattattactgcggaacatgggatagcagcctgagtgctgtggtattcggcggagggaccaaactgaccgtcctaggtcagcccaaggctgccccctcggtcactctgttcccgccctcctctgaggagcttcaagccaacaaggccacactggtgtgtctcataagtgacttctacccgggagccgtgacagtggcctggaaggcagatagcagccccgtcaaggcgggagtggagaccaccacaccctccaaacaaagcaacaacaagtacgcggccagcagctatctgagcctgacgcctgagcagtggaagtcccacagaagctacagctgccaggtcacgcatgaagggagcaccgtggagaagacagtggcccctacagaatgttca

SEQ ID NO: 2034 - DNA, 648 bp, synthetic construct; identical to SEQ ID NO: 2033
  misc_feature 1..648: note = source = /note="Description of Artificial Sequence: Synthetic polynucleotide"
  source 1..648: mol_type = other DNA

SEQ ID NO: 2035 - DNA, 648 bp, synthetic construct; identical to SEQ ID NO: 2026
  misc_feature 1..648: note = source = /note="Description of Artificial Sequence: Synthetic polynucleotide"
  source 1..648: mol_type = other DNA

SEQ ID NO: 2036 - DNA, 648 bp, synthetic construct
  misc_feature 1..648: note = source = /note="Description of Artificial Sequence: Synthetic polynucleotide"
  source 1..648: mol_type = other DNA
cagtctgtgttgacgcagccgccctcagtgtctgcggccccaggacagaaggtcaccatctcctgctctggaagcagctccaacattggaaataattatgtatcctggtatcagcagctcccaggaacagcccccaaactcctcatttatgacaataataagcgaccctcagggattcctgaccgattctctggctccaagtctggcacgtcagccaccctggccatcaccggactccagactggggacgaggccgattattactgcggaacattcgaaagcagcctgagtgctgtggtattcggcggagggaccaaactgaccgtcctaggtcagcccaaggctgccccctcggtcactctgttcccgccctcctctgaggagcttcaagccaacaaggccacactggtgtgtctcataagtgacttctacccgggagccgtgacagtggcctggaaggcagatagcagccccgtcaaggcgggagtggagaccaccacaccctccaaacaaagcaacaacaagtacgcggccagcagctatctgagcctgacgcctgagcagtggaagtcccacagaagctacagctgccaggtcacgcatgaagggagcaccgtggagaagacagtggcccctacagaatgttca

SEQ ID NO: 2037 - DNA, 648 bp, synthetic construct
  misc_feature 1..648: note = source = /note="Description of Artificial Sequence: Synthetic polynucleotide"
  source 1..648: mol_type = other DNA
cagtctgtgttgacgcagccgccctcagtgtctgcggccccaggacagaaggtcaccatctcctgctctggaagcagctccaacattggaaataattatgtatcctggtatcagcagctcccaggaacagcccccaaactcctcatttatgacaataataagcgaccctcagggattcctgaccgattctctggctccaagtctggcacgtcagccaccctggccatcaccggactccagactggggacgaggccgattattactgcggaacatgggatagcagcctgagtgctgtggtattcggcggagggaccaaactgaccgtcctaggtcagcccaaggctgccccctcggtcactctgttcccgccctcctctgaggagcttcaagccaacaaggccacactggtgtgtctcataagtgacttctacccgggagccgtgacagtggcctggaaggcagatagcagccccgtcaaggcgggagtggagaccaccacaccctccaaacaaagcaacaacaagtacgcggccagcagctatctgagcctgacgcctgagcagtggaagtcccacagaagctacagctgccaggtcacgcatgaagggagcaccgtggagaagacagtggcccctacagaatgttca

SEQ ID NO: 2038 - DNA, 648 bp, synthetic construct; identical to SEQ ID NO: 2037
  misc_feature 1..648: note = source = /note="Description of Artificial Sequence: Synthetic polynucleotide"
  source 1..648: mol_type = other DNA

SEQ ID NO: 2039 - DNA, 648 bp, synthetic construct; identical to SEQ ID NO: 2033
  misc_feature 1..648: note = source = /note="Description of Artificial Sequence: Synthetic polynucleotide"
  source 1..648: mol_type = other DNA

SEQ ID NO: 2040 - DNA, 648 bp, synthetic construct; identical to SEQ ID NO: 2036
  misc_feature 1..648: note = source = /note="Description of Artificial Sequence: Synthetic polynucleotide"
  source 1..648: mol_type = other DNA

SEQ ID NO: 2041 - DNA, 642 bp, synthetic construct
  misc_feature 1..642: note = source = /note="Description of Artificial Sequence: Synthetic polynucleotide"
  source 1..642: mol_type = other DNA
gacatccagctgacccagtctccatcctccctgtctgcatctgtaggagacagagtcactatcacttgccgggcaagtcagaccattagcaggtttttaaattggtatcagcagaaacctgggaaagcccctaagctcctgatctatgttgcatccagtttgcaaagtggggtcccatcaagattcagtggcagtggttctgggacagatttcactctcaccatcagcagtctgcaacctgaagattttgcaacttactactgtcaacagagttacagtaccctgctcagttttggccaggggaccaagctggagatcaaacgaacggtggctgcaccatctgtcttcatcttcccgccatctgatgagcagttgaaatctggaactgcctctgttgtgtgcctgctgaataacttctatcccagagaggccaaagtacagtggaaggtggataacgccctccaatcgggtaactcccaggagagtgtcacagagcaggacagcaaggacagcacctacagcctcagcagcaccctgacgctgagcaaagcagactacgagaaacacaaagtctacgcctgcgaagtcacccatcagggcctgagctcgcccgtcacaaagagcttcaacaggggagagtgt

SEQ ID NO: 2042 - DNA, 1374 bp, synthetic construct
  misc_feature 1..1374: note = source = /note="Description of Artificial Sequence: Synthetic polynucleotide"
  source 1..1374: mol_type = other DNA
cagatgcaggtggtgcagtctggggctgaggtgaagaagcctggggcctcagtgaaggtctcctgcaaggcttccggatacaccttcaccggctactatatgcattgggtgcgacaggcccctggacaagggcttgagtggatgggatggatcaaccctaacagtggtggcacaaactatgcacagaagtttcagggcagggtcaccatgaccagggacacgtccatcagtacagcctacatggagctgagcaggctgaggtctgacgacacggccgtgtattactgtgcgagagggggggattacgtttgggggacttatcggcctcactactactacggtatggacgtctggggccaagggaccacggtcaccgtctcctcagcctccaccaagggcccatcggtcttccccctggcaccctcctccaagagcacctctgggggcacagcggccctgggctgcctggtcaaggactacttccccgaaccggtgacggtgtcgtggaactcaggcgccctgaccagcggcgtgcacaccttcccggctgtcctacagtcctcaggactctactccctcagcagcgtggtgaccgtgccctccagcagcttgggcacccagacctacatctgcaacgtgaatcacaagcccagcaacaccaaggtggacaagaaagttgagcccaaatcttgtgacaaaactcacacatgcccaccgtgcccagcacctgaactcctggggggaccgtcagtcttcctcttccccccaaaacccaaggacaccctcatgatctcccggacccctgaggtcacatgcgtggtggtggacgtgagccacgaagaccctgaggtcaagttcaactggtacgtggacggcgtggaggtgcataatgccaagacaaagccgtgtgaggagcagtacggcagcacgtaccgttgtgtcagcgtcctcaccgtcctgcaccaggactggctgaatggcaaggagtacaagtgcaaggtctccaacaaagccctcccagcccccatcgagaaaaccatctccaaagccaaagggcagccccgagaaccacaggtgtacaccctgcccccatcccgggaggagatgaccaagaaccaggtcagcctgacctgcctggtcaaaggcttctatcccagcgacatcgccgtggagtgggagagcaatgggcagccggagaacaactacaagaccacgcctcccgtgctggactccgacggctccttcttcctctatagcaagctcaccgtggacaagagcaggtggcagcaggggaacgtcttctcatgctccgtgatgcatgaggctctgcacaaccactacacgcagaagagcctctccctgtctccgggtaaa

SEQ ID NO: 2043 - DNA, 1353 bp, synthetic construct
  misc_feature 1..1353: note = source = /note="Description of Artificial Sequence: Synthetic polynucleotide"
  source 1..1353: mol_type = other DNA
caggtgcagctggtggagtctgggggaggcgtggtccagcctgggaggtccctgagactctcctgtgcagcgtctggattcactttcagtaactttggcatgcactgggtccgccaggctccaggcaaggggctggagtgggtggcagttatatggtatgatggaagtaatgaaaactatgcagactccgtgaagggccgattcaccatctccagagacaattccaagaatacgctgtatctgcacatgaacagcctgagagtcgcggacacggctgtgtattattgtgcgcgagatgggacgatctttggagtggtcttgggggactactggggccagggaaccctggtcaccgtctcctcagcctccaccaagggcccatcggtcttccccctggcaccctcctccaagagcacctctgggggcacagcggccctgggctgcctggtcaaggactacttccccgaaccggtgacggtgtcgtggaactcaggcgccctgaccagcggcgtgcacaccttcccggctgtcctacagtcctcaggactctactccctcagcagcgtggtgaccgtgccctccagcagcttgggcacccagacctacatctgcaacgtgaatcacaagcccagcaacaccaaggtggacaagaaagttgagcccaaatcttgtgacaaaactcacacatgcccaccgtgcccagcacctgaactcctggggggaccgtcagtcttcctcttccccccaaaacccaaggacaccctcatgatctcccggacccctgaggtcacatgcgtggtggtggacgtgagccacgaagaccctgaggtcaagttcaactggtacgtggacggcgtggaggtgcataatgccaagacaaagccgtgtgaggagcagtacggcagcacgtaccgttgtgtcagcgtcctcaccgtcctgcaccaggactggctgaatggcaaggagtacaagtgcaaggtctccaacaaagccctcccagcccccatcgagaaaaccatctccaaagccaaagggcagccccgagaaccacaggtgtacaccctgcccccatcccgggaggagatgaccaagaaccaggtcagcctgacctgcctggtcaaaggcttctatcccagcgacatcgccgtggagtgggagagcaatgggcagccggagaacaactacaagaccacgcctcccgtgctggactccgacggctccttcttcctctatagcaagctcaccgtggacaagagcaggtggcagcaggggaacgtcttctcatgctccgtgatgcatgaggctctgcacaaccactacacgcagaagagcctctccctgtctccgggtaaa

SEQ ID NO: 2044 - DNA, 1353 bp, synthetic construct
  misc_feature 1..1353: note = source = /note="Description of Artificial Sequence: Synthetic polynucleotide"
  source 1..1353: mol_type = other DNA
caggtgcagctggtggagtctgggggaggcgtggtccagcctgggaggtccctgagactctcctgtgcagcgtctggattcaccttcagttactttggcatgcactgggtccgccaggctccaggcaaggggctggagtgggtggcagttatatggtatgatggaagtaataaatactatgcagactccgtgaagggccgcttcaccatctccagagacaattccaagaacacgctgtatctgcaaatgaacagcctgagagccgaggacacggctgtgtattactgtgcgcgagatgggacgatttttggagtgctcttgggggactactggggccagggaaccctggtcaccgtctcctcagcctccaccaagggcccatcggtcttccccctggcaccctcctccaagagcacctctgggggcacagcggccctgggctgcctggtcaaggactacttccccgaaccggtgacggtgtcgtggaactcaggcgccctgaccagcggcgtgcacaccttcccggctgtcctacagtcctcaggactctactccctcagcagcgtggtgaccgtgccctccagcagcttgggcacccagacctacatctgcaacgtgaatcacaagcccagcaacaccaaggtggacaagaaagttgagcccaaatcttgtgacaaaactcacacatgcccaccgtgcccagcacctgaactcctggggggaccgtcagtcttcctcttccccccaaaacccaaggacaccctcatgatctcccggacccctgaggtcacatgcgtggtggtggacgtgagccacgaagaccctgaggtcaagttcaactggtacgtggacggcgtggaggtgcataatgccaagacaaagccgtgtgaggagcagtacggcagcacgtaccgttgtgtcagcgtcctcaccgtcctgcaccaggactggctgaatggcaaggagtacaagtgcaaggtctccaacaaagccctcccagcccccatcgagaaaaccatctccaaagccaaagggcagccccgagaaccacaggtgtacaccctgcccccatcccgggaggagatgaccaagaaccaggtcagcctgacctgcctggtcaaaggcttctatcccagcgacatcgccgtggagtgggagagcaatgggcagccggagaacaactacaagaccacgcctcccgtgctggactccgacggctccttcttcctctatagcaagctcaccgtggacaagagcaggtggcagcaggggaacgtcttctcatgctccgtgatgcatgaggctctgcacaaccactacacgcagaagagcctctccctgtctccgggtaaa

SEQ ID NO: 2045 - DNA, 1350 bp, synthetic construct
  misc_feature 1..1350: note = source = /note="Description of Artificial Sequence: Synthetic polynucleotide"
  source 1..1350: mol_type = other DNA
caggtgcaactggtggagtctgggggaggcgtggtccagcctgggaggtccctgagactctcctgtgcagcgtctggattcaccttcagtagctatggcatgcactgggtccgccaggctccaggcaaggggctggagtgggtggcagttatatggtatgatggaagtaataaatactatgcagactccgtgaagggccgattcaccatctccagcgacaattccaagaacacgctgtatctgcaaatgaacagcctgagagccgaggacacggctgtgtattactgtgcgagagataggacgatttttggagtggttcttgactactggggccagggaaccctggtcaccgtctcctcagcctccaccaagggcccatcggtcttccccctggcaccctcctccaagagcacctctgggggcacagcggccctgggctgcctggtcaaggactacttccccgaaccggtgacggtgtcgtggaactcaggcgccctgaccagcggcgtgcacaccttcccggctgtcctacagtcctcaggactctactccctcagcagcgtggtgaccgtgccctccagcagcttgggcacccagacctacatctgcaacgtgaatcacaagcccagcaacaccaaggtggacaagaaagttgagcccaaatcttgtgacaaaactcacacatgcccaccgtgcccagcacctgaactcctggggggaccgtcagtcttcctcttccccccaaaacccaaggacaccctcatgatctcccggacccctgaggtcacatgcgtggtggtggacgtgagccacgaagaccctgaggtcaagttcaactggtacgtggacggcgtggaggtgcataatgccaagacaaagccgtgtgaggagcagtacggcagcacgtaccgttgtgtcagcgtcctcaccgtcctgcaccaggactggctgaatggcaaggagtacaagtgcaaggtctccaacaaagccctcccagcccccatcgagaaaaccatctccaaagccaaagggcagccccgagaaccacaggtgtacaccctgcccccatcccgggaggagatgaccaagaaccaggtcagcctgacctgcctggtcaaaggcttctatcccagcgacatcgccgtggagtgggagagcaatgggcagccggagaacaactacaagaccacgcctcccgtgctggactccgacggctccttcttcctctatagcaagctcaccgtggacaagagcaggtggcagcaggggaacgtcttctcatgctccgtgatgcatgaggctctgcacaaccactacacgcagaagagcctctccctgtctccgggtaaa

SEQ ID NO: 2046 - DNA, 1359 bp, synthetic construct
  misc_feature 1..1359: note = source = /note="Description of Artificial Sequence: Synthetic polynucleotide"
  source 1..1359: mol_type = other DNA
caggtgccgctggtgcagtctggggctgaggtgaagaagcctggggcctcagtgaaggtctcctgcaaggcttctggatacaccttcaccggctactatatccactgggtgcgacaggcccctggacaagggcttgagtggatggggtggatcaaccctgacagtggtggcacagactattcacagaggtttcagggcaggttcaccatgaccagggacacgtccatcagcacagcctacatggaactgaacaggctgagatctgacgacacggccgtgtattactgtgcgagagaggccacgatttttggaatggttattgtaccgtttgactactggggccagggaaccctggtcaccgtctcctcagcctccaccaagggcccatcggtcttccccctggcaccctcctccaagagcacctctgggggcacagcggccctgggctgcctggtcaaggactacttccccgaaccggtgacggtgtcgtggaactcaggcgccctgaccagcggcgtgcacaccttcccggctgtcctacagtcctcaggactctactccctcagcagcgtggtgaccgtgccctccagcagcttgggcacccagacctacatctgcaacgtgaatcacaagcccagcaacaccaaggtggacaagaaagttgagcccaaatcttgtgacaaaactcacacatgcccaccgtgcccagcacctgaactcctggggggaccgtcagtcttcctcttccccccaaaacccaaggacaccctcatgatctcccggacccctgaggtcacatgcgtggtggtggacgtgagccacgaagaccctgaggtcaagttcaactggtacgtggacggcgtggaggtgcataatgccaagacaaagccgtgtgaggagcagtacggcagcacgtaccgttgtgtcagcgtcctcaccgtcctgcaccaggactggctgaatggcaaggagtacaagtgcaaggtctccaacaaagccctcccagcccccatcgagaaaaccatctccaaagccaaagggcagccccgagaaccacaggtgtacaccctgcccccatcccgggaggagatgaccaagaaccaggtcagcctgacctgcctggtcaaaggcttctatcccagcgacatcgccgtggagtgggagagcaatgggcagccggagaacaactacaagaccacgcctcccgtgctggactccgacggctccttcttcctctatagcaagctcaccgtggacaagagcaggtggcagcaggggaacgtcttctcatgctccgtgatgcatgaggctctgcacaaccactacacgcagaagagcctctccctgtctccgggtaaa

SEQ ID NO: 2047 - DNA, 1359 bp, synthetic construct
  misc_feature 1..1359: note = source = /note="Description of Artificial Sequence: Synthetic polynucleotide"
  source 1..1359: mol_type = other DNA
caggtgccgctggtgcagtctggggctgaggtgaagaagcctggggcctcagtgaaggtctcctgcaaggcttctggatacaccttcaccggctactatatccactgggtgcgacaggcccctggacaaggacttgagtggatggggtggatcaaccctgacagtggtggcacagactattcacagaggtttcagggcaggttcaccatgaccagggacacgtccatcagcacagcctacatggaactgagcaggctgagatctgacgacacggccgtgtattactgtgcgagagaggccacgatttttggaatggttattgtaccgtttgactactggggccagggaaccctggtcaccgtctcctcagcctccaccaagggcccatcggtcttccccctggcaccctcctccaagagcacctctgggggcacagcggccctgggctgcctggtcaaggactacttccccgaaccggtgacggtgtcgtggaactcaggcgccctgaccagcggcgtgcacaccttcccggctgtcctacagtcctcaggactctactccctcagcagcgtggtgaccgtgccctccagcagcttgggcacccagacctacatctgcaacgtgaatcacaagcccagcaacaccaaggtggacaagaaagttgagcccaaatcttgtgacaaaactcacacatgcccaccgtgcccagcacctgaactcctggggggaccgtcagtcttcctcttccccccaaaacccaaggacaccctcatgatctcccggacccctgaggtcacatgcgtggtggtggacgtgagccacgaagaccctgaggtcaagttcaactggtacgtggacggcgtggaggtgcataatgccaagacaaagccgtgtgaggagcagtacggcagcacgtaccgttgtgtcagcgtcctcaccgtcctgcaccaggactggctgaatggcaaggagtacaagtgcaaggtctccaacaaagccctcccagcccccatcgagaaaaccatctccaaagccaaagggcagccccgagaaccacaggtgtacaccctgcccccatcccgggaggagatgaccaagaaccaggtcagcctgacctgcctggtcaaaggcttctatcccagcgacatcgccgtggagtgggagagcaatgggcagccggagaacaactacaagaccacgcctcccgtgctggactccgacggctccttcttcctctatagcaagctcaccgtggacaagagcaggtggcagcaggggaacgtcttctcatgctccgtgatgcatgaggctctgcacaaccactacacgcagaagagcctctccctgtctccgggtaaa

SEQ ID NO: 2048 - DNA, 1359 bp, synthetic construct
  misc_feature 1..1359: note = source = /note="Description of Artificial Sequence: Synthetic polynucleotide"
  source 1..1359: mol_type = other DNA
caggtgccgctggtacagtctggggctgaggtgaagaagcctggggcctcagtgaaggtctcctgcaaggcttctggatacaccttcaccggctactatatacactgggtgcgtcaggcccctggacaagggcttgtgtggatggggtggatcagccctaacagtggtgacacaagctatgcacagaagtttcaggacagggtcaccatgaccagggacacgtccatcagcacagcctatatggagctgagcagactgagatctgacgacacggccgtgtatttctgtacgagagaggccacgatttttggaatgcttattgtaccatttgactactggggccagggaaccctggtcaccgtctcctcagcctccaccaagggcccatcggtcttccccctggcaccctcctccaagagcacctctgggggcacagcggccctgggctgcctggtcaaggactacttccccgaaccggtgacggtgtcgtggaactcaggcgccctgaccagcggcgtgcacaccttcccggctgtcctacagtcctcaggactctactccctcagcagcgtggtgaccgtgccctccagcagcttgggcacccagacctacatctgcaacgtgaatcacaagcccagcaacaccaaggtggacaagaaagttgagcccaaatcttgtgacaaaactcacacatgcccaccgtgcccagcacctgaactcctggggggaccgtcagtcttcctcttccccccaaaacccaaggacaccctcatgatctcccggacccctgaggtcacatgcgtggtggtggacgtgagccacgaagaccctgaggtcaagttcaactggtacgtggacggcgtggaggtgcataatgccaagacaaagccgtgtgaggagcagtacggcagcacgtaccgttgtgtcagcgtcctcaccgtcctgcaccaggactggctgaatggcaaggagtacaagtgcaaggtctccaacaaagccctcccagcccccatcgagaaaaccatctccaaagccaaagggcagccccgagaaccacaggtgtacaccctgcccccatcccgggaggagatgaccaagaaccaggtcagcctgacctgcctggtcaaaggcttctatcccagcgacatcgccgtggagtgggagagcaatgggcagccggagaacaactacaagaccacgcctcccgtgctggactccgacggctccttcttcctctatagcaagctcaccgtggacaagagcaggtggcagcaggggaacgtcttctcatgctccgtgatgcatgaggctctgcacaaccactacacgcagaagagcctctccctgtctccgggtaaa

SEQ ID NO: 2049 - DNA, 1359 bp, synthetic construct
  misc_feature 1..1359: note = source = /note="Description of Artificial Sequence: Synthetic polynucleotide"
  source 1..1359: mol_type = other DNA
caggtgccgctggtgcagtctggggctgaggtgaagaagcctggggcctcagtgaaggtctcctgcaaggcttctggatacaccttcaccggctactatatacactgggtgcgtcaggcccctggacaagggcttgagtggatggggtggataagccctaacaatggtgacacaaactatgcacagaagtttcaggacagggtcaccatgaccagggacacgtccatcagcacagcctatatggagctgagcaggctgagatctgacgacacggccgtgtattactgtacgagagaggccacgatttttggaatgcttattgtaccatttgactactggggccagggaaccctggtcaccgtctcctcagcctccaccaagggcccatcggtcttccccctggcaccctcctccaagagcacctctgggggcacagcggccctgggctgcctggtcaaggactacttccccgaaccggtgacggtgtcgtggaactcaggcgccctgaccagcggcgtgcacaccttcccggctgtcctacagtcctcaggactctactccctcagcagcgtggtgaccgtgccctccagcagcttgggcacccagacctacatctgcaacgtgaatcacaagcccagcaacaccaaggtggacaagaaagttgagcccaaatcttgtgacaaaactcacacatgcccaccgtgcccagcacctgaactcctggggggaccgtcagtcttcctcttccccccaaaacccaaggacaccctcatgatctcccggacccctgaggtcacatgcgtggtggtggacgtgagccacgaagaccctgaggtcaagttcaactggtacgtggacggcgtggaggtgcataatgccaagacaaagccgtgtgaggagcagtacggcagcacgtaccgttgtgtcagcgtcctcaccgtcctgcaccaggactggctgaatggcaaggagtacaagtgcaaggtctccaacaaagccctcccagcccccatcgagaaaaccatctccaaagccaaagggcagccccgagaaccacaggtgtacaccctgcccccatcccgggaggagatgaccaagaaccaggtcagcctgacctgcctggtcaaaggcttctatcccagcgacatcgccgtggagtgggagagcaatgggcagccggagaacaactacaagaccacgcctcccgtgctggactccgacggctccttcttcctctatagcaagctcaccgtggacaagagcaggtggcagcaggggaacgtcttctcatgctccgtgatgcatgaggctctgcacaaccactacacgcagaagagcctctccctgtctccgggtaaa

SEQ ID NO: 2050 - DNA, 1368 bp, synthetic construct
  misc_feature 1..1368: note = source = /note="Description of Artificial Sequence: Synthetic polynucleotide"
  source 1..1368: mol_type = other DNA
caggtgcagttgcaggagtcgggcccaggactggtgaagccttcacagaccctgtccctcacctgcactgtctctggtgactccatcagcagtggtggttactactggagctggatccgccagcacccagggaagggcctggagtggattgggtacatctattacagtgggagcacctactacaacccgtccctcaagagtcgagttaccatatcagtagacacgtctaagaaccagttctccctgaagctgagctctgtgactgccgcggacacggccgtgtattactgtgcgagagatcgtattacgatttttggagtggttatggggggcggtatggacgtctggggccaagggaccacggtcaccgtctcctcagcctccaccaagggcccatcggtcttccccctggcaccctcctccaagagcacctctgggggcacagcggccctgggctgcctggtcaaggactacttccccgaaccggtgacggtgtcgtggaactcaggcgccctgaccagcggcgtgcacaccttcccggctgtcctacagtcctcaggactctactccctcagcagcgtggtgaccgtgccctccagcagcttgggcacccagacctacatctgcaacgtgaatcacaagcccagcaacaccaaggtggacaagaaagttgagcccaaatcttgtgacaaaactcacacatgcccaccgtgcccagcacctgaactcctggggggaccgtcagtcttcctcttccccccaaaacccaaggacaccctcatgatctcccggacccctgaggtcacatgcgtggtggtggacgtgagccacgaagaccctgaggtcaagttcaactggtacgtggacggcgtggaggtgcataatgccaagacaaagccgtgtgaggagcagtacggcagcacgtaccgttgtgtcagcgtcctcaccgtcctgcaccaggactggctgaatggcaaggagtacaagtgcaaggtctccaacaaagccctcccagcccccatcgagaaaaccatctccaaagccaaagggcagccccgagaaccacaggtgtacaccctgcccccatcccgggaggagatgaccaagaaccaggtcagcctgacctgcctggtcaaaggcttctatcccagcgacatcgccgtggagtgggagagcaatgggcagccggagaacaactacaagaccacgcctcccgtgctggactccgacggctccttcttcctctatagcaagctcaccgtggacaagagcaggtggcagcaggggaacgtcttctcatgctccgtgatgcatgaggctctgcacaaccactacacgcagaagagcctctccctgtctccgggtaaa

SEQ ID NO: 2051 - DNA, 1350 bp, synthetic construct
  misc_feature 1..1350: note = source = /note="Description of Artificial Sequence: Synthetic polynucleotide"
  source 1..1350: mol_type = other DNA
caggtgcagctggtggagtctgggggaggcgtggtccagcctgggaggtccctgagactctcctgtgcagcatctggattcaccttcagtaactatggcatgcactgggtccgccaggctccaggcgaggggctggagtgggtggcagctatatggtttgatggaagtgataaatactatgcagactccgtgaagggccgattcaccatctccagagacaactccaagaacacgctgtatctgcaaatgaacagcctgagagccgaggacacggctgtgtattactgtgcgagagatcaggcgatttttggagtggtccccgactactggggccagggaaccctggtcaccgtctcctcagcctccaccaagggcccatcggtcttccccctggcaccctcctccaagagcacctctgggggcacagcggccctgggctgcctggtcaaggactacttccccgaaccggtgacggtgtcgtggaactcaggcgccctgaccagcggcgtgcacaccttcccggctgtcctacagtcctcaggactctactccctcagcagcgtggtgaccgtgccctccagcagcttgggcacccagacctacatctgcaacgtgaatcacaagcccagcaacaccaaggtggacaagaaagttgagcccaaatcttgtgacaaaactcacacatgcccaccgtgcccagcacctgaactcctggggggaccgtcagtcttcctcttccccccaaaacccaaggacaccctcatgatctcccggacccctgaggtcacatgcgtggtggtggacgtgagccacgaagaccctgaggtcaagttcaactggtacgtggacggcgtggaggtgcataatgccaagacaaagccgtgtgaggagcagtacggcagcacgtaccgttgtgtcagcgtcctcaccgtcctgcaccaggactggctgaatggcaaggagtacaagtgcaaggtctccaacaaagccctcccagcccccatcgagaaaaccatctccaaagccaaagggcagccccgagaaccacaggtgtacaccctgcccccatcccgggaggagatgaccaagaaccaggtcagcctgacctgcctggtcaaaggcttctatcccagcgacatcgccgtggagtgggagagcaatgggcagccggagaacaactacaagaccacgcctcccgtgctggactccgacggctccttcttcctctatagcaagctcaccgtggacaagagcaggtggcagcaggggaacgtcttctcatgctccgtgatgcatgaggctctgcacaaccactacacgcagaagagcctctccctgtctccgggtaaa

SEQ ID NO: 2052 - DNA, 1353 bp, synthetic construct; identical to SEQ ID NO: 2044
  misc_feature 1..1353: note = source = /note="Description of Artificial Sequence: Synthetic polynucleotide"
  source 1..1353: mol_type = other DNA

SEQ ID NO: 2053 - DNA, 1350 bp, synthetic construct
  misc_feature 1..1350: note = source = /note="Description of Artificial Sequence: Synthetic polynucleotide"
  source 1..1350: mol_type = other DNA
caggtgcagctggtggagtctgggggaggcgtggtccagcctgggaggtccctgagactctcctgtgcagcgtctggattctccttcagtagctatggcatgcactgggtccgccagcctccaggcaaggggctggagtgggtggcagctatatggtatgatggaaataataaatactatgcagactccgtgaagggccgattcaccatctccagagacagttccaagaacacgctgtatctgcaaatgaacagcctgagagccgaggacacggctgtgtattactgtgcgagagatcggacgatttttggagtggtccttgagtacctcggccagggaaccctggtcaccgtctcctcagcctccaccaagggcccatcggtcttccccctggcaccctcctccaagagcacctctgggggcacagcggccctgggctgcctggtcaaggactacttccccgaaccggtgacggtgtcgtggaactcaggcgccctgaccagcggcgtgcacaccttcccggctgtcctacagtcctcaggactctactccctcagcagcgtggtgaccgtgccctccagcagcttgggcacccagacctacatctgcaacgtgaatcacaagcccagcaacaccaaggtggacaagaaagttgagcccaaatcttgtgacaaaactcacacatgcccaccgtgcccagcacctgaactcctggggggaccgtcagtcttcctcttccccccaaaacccaaggacaccctcatgatctcccggacccctgaggtcacatgcgtggtggtggacgtgagccacgaagaccctgaggtcaagttcaactggtacgtggacggcgtggaggtgcataatgccaagacaaagccgtgtgaggagcagtacggcagcacgtaccgttgtgtcagcgtcctcaccgtcctgcaccaggactggctgaatggcaaggagtacaagtgcaaggtctccaacaaagccctcccagcccccatcgagaaaaccatctccaaagccaaagggcagccccgagaaccacaggtgtacaccctgcccccatcccgggaggagatgaccaagaaccaggtcagcctgacctgcctggtcaaaggcttctatcccagcgacatcgccgtggagtgggagagcaatgggcagccggagaacaactacaagaccacgcctcccgtgctggactccgacggctccttcttcctctatagcaagctcaccgtggacaagagcaggtggcagcaggggaacgtcttctcatgctccgtgatgcatgaggctctgcacaaccactacacgcagaagagcctctccctgtctccgggtaaa

SEQ ID NO: 2054 - DNA, 1341 bp, synthetic construct
  misc_feature 1..1341: note = source = /note="Description of Artificial Sequence: Synthetic polynucleotide"
  source 1..1341: mol_type = other DNA
caggtgcagctgcaggagtcgggcccaggactggtgaagccttcggagaccctgtccctcacctgcactgtctctcagggctccatcagtagttactactggagctggatccggcagcccgccgggaagggactagagtggattggccgtatctataccagtgggagcaccaactacaacccctccctcaagagtcgagtcaccatgtcaatagacacgtccaagaaccagttctccctgaaactgaactctgtgaccgccgcggacacggccgtgtattactgtgcgagagatgtagcagtggctggctttgactactggggccagggaaccctggtcaccgtctcctcagcctccaccaagggcccatcggtcttccccctggcaccctcctccaagagcacctctgggggcacagcggccctgggctgcctggtcaaggactacttccccgaaccggtgacggtgtcgtggaactcaggcgccctgaccagcggcgtgcacaccttcccggctgtcctacagtcctcaggactctactccctcagcagcgtggtgaccgtgccctccagcagcttgggcacccagacctacatctgcaacgtgaatcacaagcccagcaacaccaaggtggacaagaaagttgagcccaaatcttgtgacaaaactcacacatgcccaccgtgcccagcacctgaactcctggggggaccgtcagtcttcctcttccccccaaaacccaaggacaccctcatgatctcccggacccctgaggtcacatgcgtggtggtggacgtgagccacgaagaccctgaggtcaagttcaactggtacgtggacggcgtggaggtgcataatgccaagacaaagccgtgtgaggagcagtacggcagcacgtaccgttgtgtcagcgtcctcaccgtcctgcaccaggactggctgaatggcaaggagtacaagtgcaaggtctccaacaaagccctcccagcccccatcgagaaaaccatctccaaagccaaagggcagccccgagaaccacaggtgtacaccctgcccccatcccgggaggagatgaccaagaaccaggtcagcctgacctgcctggtcaaaggcttctatcccagcgacatcgccgtggagtgggagagcaatgggcagccggagaacaactacaagaccacgcctcccgtgctggactccgacggctccttcttcctctatagcaagctcaccgtggacaagagcaggtggcagcaggggaacgtcttctcatgctccgtgatgcatgaggctctgcacaaccactacacgcagaagagcctctccctgtctccgggtaaa

SEQ ID NO: 2055 - DNA, 1341 bp, synthetic construct
  misc_feature 1..1341: note = source = /note="Description of Artificial Sequence: Synthetic polynucleotide"
  source 1..1341: mol_type = other DNA
caggtgcagctgcaggagtcgggcccaggactggtgaagccttcggagaccctgtccctcacctgcactgtctctgggggctccatcagtagttactactggagctggatccggcagcccgccgggaagggactagagtggattggccgtatctataccagtgggagcaccaactacaacccctccctcaagagtcgagtcaccatgtcaatagacacgtccaagaaccagttctccctgaaactgaactctgtgaccgccgcggacacggccgtgtattactgtgcgagagatgtagcagtggctggctttgactactggggccagggaaccctggtcaccgtctcctcagcctccaccaagggcccatcggtcttccccctggcaccctcctccaagagcacctctgggggcacagcggccctgggctgcctggtcaaggactacttccccgaaccggtgacggtgtcgtggaactcaggcgccctgaccagcggcgtgcacaccttcccggctgtcctacagtcctcaggactctactccctcagcagcgtggtgaccgtgccctccagcagcttgggcacccagacctacatctgcaacgtgaatcacaagcccagcaacaccaaggtggacaagaaagttgagcccaaatcttgtgacaaaactcacacatgcccaccgtgcccagcacctgaactcctggggggaccgtcagtcttcctcttccccccaaaacccaaggacaccctcatgatctcccggacccctgaggtcacatgcgtggtggtggacgtgagccacgaagaccctgaggtcaagttcaactggtacgtggacggcgtggaggtgcataatgccaagacaaagccgtgtgaggagcagtacggcagcacgtaccgttgtgtcagcgtcctcaccgtcctgcaccaggactggctgaatggcaaggagtacaagtgcaaggtctccaacaaagccctcccagcccccatcgagaaaaccatctccaaagccaaagggcagccccgagaaccacaggtgtacaccctgcccccatcccgggaggagatgaccaagaaccaggtcagcctgacctgcctggtcaaaggcttctatcccagcgacatcgccgtggagtgggagagcaatgggcagccggagaacaactacaagaccacgcctcccgtgctggactccgacggctccttcttcctctatagcaagctcaccgtggacaagagcaggtggcagcaggggaacgtcttctcatgctccgtgatgcatgaggctctgcacaaccactacacgcagaagagcctctccctgtctccgggtaaa

SEQ ID NO: 2056 - DNA, 1353 bp, synthetic construct
  misc_feature 1..1353: note = source = /note="Description of Artificial Sequence: Synthetic polynucleotide"
  source 1..1353: mol_type = other DNA
caggtgcagctggtggagtctgggggaggcgtggtccagcctgggaggtccctgagactctcctgtgcagcgtctggattcaccttcagttactttggcatgcactgggtccgccaggctccaggcaaggggctggagtgggtggcagttatatggtatgatgcaagtaataaatactatgcagacgccgtgaagggccgcttcaccatctccagagacaattccaagaacacgctgtatctgcaaatgaacagcctgagagccgaggacacggctgtgtattactgtgcgcgagatgggacgatttttggagtgctcttgggggactactggggccagggaaccctggtcaccgtctcctcagcctccaccaagggcccatcggtcttccccctggcaccctcctccaagagcacctctgggggcacagcggccctgggctgcctggtcaaggactacttccccgaaccggtgacggtgtcgtggaactcaggcgccctgaccagcggcgtgcacaccttcccggctgtcctacagtcctcaggactctactccctcagcagcgtggtgaccgtgccctccagcagcttgggcacccagacctacatctgcaacgtgaatcacaagcccagcaacaccaaggtggacaagaaagttgagcccaaatcttgtgacaaaactcacacatgcccaccgtgcccagcacctgaactcctggggggaccgtcagtcttcctcttccccccaaaacccaaggacaccctcatgatctcccggacccctgaggtcacatgcgtggtggtggacgtgagccacgaagaccctgaggtcaagttcaactggtacgtggacggcgtggaggtgcataatgccaagacaaagccgtgtgaggagcagtacggcagcacgtaccgttgtgtcagcgtcctcaccgtcctgcaccaggactggctgaatggcaaggagtacaagtgcaaggtctccaacaaagccctcccagcccccatcgagaaaaccatctccaaagccaaagggcagccccgagaaccacaggtgtacaccctgcccccatcccgggaggagatgaccaagaaccaggtcagcctgacctgcctggtcaaaggcttctatcccagcgacatcgccgtggagtgggagagcaatgggcagccggagaacaactacaagaccacgcctcccgtgctggactccgacggctccttcttcctctatagcaagctcaccgtggacaagagcaggtggcagcaggggaacgtcttctcatgctccgtgatgcatgaggctctgcacaaccactacacgcagaagagcctctccctgtctccgggtaaa

SEQ ID NO: 2057 - DNA, 1353 bp, synthetic construct
  misc_feature 1..1353: note = source = /note="Description of Artificial Sequence: Synthetic polynucleotide"
  source 1..1353: mol_type = other DNA
caggtgcagctggtggagtctgggggaggcgtggtccagcctgggaggtccctgagactctcctgtgcagcgtctggattcaccttcagttactttggcatgcactgggtccgccaggctccaggcaaggggctggagtgggtggcagttatatggtatgatgcaagtaataaatactatgcagactccgtgaagggccgcttcaccatctccagagacaattccaagaacacgctgtatctgcaaatgaacagcctgagagccgaggacacggctgtgtattactgtgcgcgagatgggacgatttttggagtgctcttgggggactactggggccagggaaccctggtcaccgtctcctcagcctccaccaagggcccatcggtcttccccctggcaccctcctccaagagcacctctgggggcacagcggccctgggctgcctggtcaaggactacttccccgaaccggtgacggtgtcgtggaactcaggcgccctgaccagcggcgtgcacaccttcccggctgtcctacagtcctcaggactctactccctcagcagcgtggtgaccgtgccctccagcagcttgggcacccagacctacatctgcaacgtgaatcacaagcccagcaacaccaaggtggacaagaaagttgagcccaaatcttgtgacaaaactcacacatgcccaccgtgcccagcacctgaactcctggggggaccgtcagtcttcctcttccccccaaaacccaaggacaccctcatgatctcccggacccctgaggtcacatgcgtggtggtggacgtgagccacgaagaccctgaggtcaagttcaactggtacgtggacggcgtggaggtgcataatgccaagacaaagccgtgtgaggagcagtacggcagcacgtaccgttgtgtcagcgtcctcaccgtcctgcaccaggactggctgaatggcaaggagtacaagtgcaaggtctccaacaaagccctcccagcccccatcgagaaaaccatctccaaagccaaagggcagccccgagaaccacaggtgtacaccctgcccccatcccgggaggagatgaccaagaaccaggtcagcctgacctgcctggtcaaaggcttctatcccagcgacatcgccgtggagtgggagagcaatgggcagccggagaacaactacaagaccacgcctcccgtgctggactccgacggctccttcttcctctatagcaagctcaccgtggacaagagcaggtggcagcaggggaacgtcttctcatgctccgtgatgcatgaggctctgcacaaccactacacgcagaagagcctctccctgtctccgggtaaa

SEQ ID NO: 2058 - DNA, 1353 bp, synthetic construct
  misc_feature 1..1353: note = source = /note="Description of Artificial Sequence: Synthetic polynucleotide"
  source 1..1353: mol_type = other DNA
caggtgcagctggtggagtctgggggaggcgtggtccagcctgggaggtccctgagactctcctgtgcagcgtctggattcaccttcagttactttggcatgcactgggtccgccaggctccaggcaaggggctggagtgggtggcagttatatggtatgatggaagtaataaatactatgcagacgccgtgaagggccgcttcaccatctccagagacaattccaagaacacgctgtatctgcaaatgaacagcctgagagccgaggacacggctgtgtattactgtgcgcgagatgggacgatttttggagtgctcttgggggactactggggccagggaaccctggtcaccgtctcctcagcctccaccaagggcccatcggtcttccccctggcaccctcctccaagagcacctctgggggcacagcggccctgggctgcctggtcaaggactacttccccgaaccggtgacggtgtcgtggaactcaggcgccctgaccagcggcgtgcacaccttcccggctgtcctacagtcctcaggactctactccctcagcagcgtggtgaccgtgccctccagcagcttgggcacccagacctacatctgcaacgtgaatcacaagcccagcaacaccaaggtggacaagaaagttgagcccaaatcttgtgacaaaactcacacatgcccaccgtgcccagcacctgaactcctggggggaccgtcagtcttcctcttccccccaaaacccaaggacaccctcatgatctcccggacccctgaggtcacatgcgtggtggtggacgtgagccacgaagaccctgaggtcaagttcaactggtacgtggacggcgtggaggtgcataatgccaagacaaagccgtgtgaggagcagtacggcagcacgtaccgttgtgtcagcgtcctcaccgtcctgcaccaggactggctgaatggcaaggagtacaagtgcaaggtctccaacaaagccctcccagcccccatcgagaaaaccatctccaaagccaaagggcagccccgagaaccacaggtgtacaccctgcccccatcccgggaggagatgaccaagaaccaggtcagcctgacctgcctggtcaaaggcttctatcccagcgacatcgccgtggagtgggagagcaatgggcagccggagaacaactacaagaccacgcctcccgtgctggactccgacggctccttcttcctctatagcaagctcaccgtggacaagagcaggtggcagcaggggaacgtcttctcatgctccgtgatgcatgaggctctgcacaaccactacacgcagaagagcctctccctgtctccgggtaaa

SEQ ID NO: 2059 - DNA, 1353 bp, synthetic construct; identical to SEQ ID NO: 2056
  misc_feature 1..1353: note = source = /note="Description of Artificial Sequence: Synthetic polynucleotide"
  source 1..1353: mol_type = other DNA

SEQ ID NO: 2060 - DNA, 1353 bp, synthetic construct; identical to SEQ ID NO: 2056
  misc_feature 1..1353: note = source = /note="Description of Artificial Sequence: Synthetic polynucleotide"
  source 1..1353: mol_type = other DNA

SEQ ID NO: 2061 - DNA, 1353 bp, synthetic construct
  misc_feature 1..1353: note = source = /note="Description of Artificial Sequence: Synthetic polynucleotide"
  source 1..1353: mol_type = other DNA
caggtgcagctggtggagtctgggggaggcgtggtccagcctgggaggtccctgagactctcctgtgcagcgtctggattcaccttcagttactttggcatgcactgggtccgccaggctccaggcaaggggctggagtgggtggcagttatatggtatgatgcaagtaataaatactatgcagacgccgtgaagggccgcttcaccatctccagagacaattccaagaacacgctgtatctgcaaatgaacagcctgagagccgaggacacggctgtgtattactgtgcgcgagataggacgatttttggagtgctcttgggggactactggggccagggaaccctggtcaccgtctcctcagcctccaccaagggcccatcggtcttccccctggcaccctcctccaagagcacctctgggggcacagcggccctgggctgcctggtcaaggactacttccccgaaccggtgacggtgtcgtggaactcaggcgccctgaccagcggcgtgcacaccttcccggctgtcctacagtcctcaggactctactccctcagcagcgtggtgaccgtgccctccagcagcttgggcacccagacctacatctgcaacgtgaatcacaagcccagcaacaccaaggtggacaagaaagttgagcccaaatcttgtgacaaaactcacacatgcccaccgtgcccagcacctgaactcctggggggaccgtcagtcttcctcttccccccaaaacccaaggacaccctcatgatctcccggacccctgaggtcacatgcgtggtggtggacgtgagccacgaagaccctgaggtcaagttcaactggtacgtggacggcgtggaggtgcataatgccaagacaaagccgtgtgaggagcagtacggcagcacgtaccgttgtgtcagcgtcctcaccgtcctgcaccaggactggctgaatggcaaggagtacaagtgcaaggtctccaacaaagccctcccagcccccatcgagaaaaccatctccaaagccaaagggcagccccgagaaccacaggtgtacaccctgcccccatcccgggaggagatgaccaagaaccaggtcagcctgacctgcctggtcaaaggcttctatcccagcgacatcgccgtggagtgggagagcaatgggcagccggagaacaactacaagaccacgcctcccgtgctggactccgacggctccttcttcctctatagcaagctcaccgtggacaagagcaggtggcagcaggggaacgtcttctcatgctccgtgatgcatgaggctctgcacaaccactacacgcagaagagcctctccctgtctccgggtaaa

SEQ ID NO: 2062 - DNA, 1353 bp, synthetic construct
  misc_feature 1..1353: note = source = /note="Description of Artificial Sequence: Synthetic polynucleotide"
  source 1..1353: mol_type = other DNA
caggtgcagctggtggagtctgggggaggcgtggtccagcctgggaggtccctgagactctcctgtgcagcgtctggattcactttcagtaactttggcatgcactgggtccgccaggctccaggcaaggggctggagtgggtggcagttatatggtatgatgcaagtaatgaaaactatgcagacgccgtgaagggccgattcaccatctccagagacaattccaagaatacgctgtatctgcaaatgaacagcctgagagtcgcggacacggctgtgtattattgtgcgcgagatgggacgatctttggagtggtcttgggggactactggggccagggaaccctggtcaccgtctcctcagcctccaccaagggcccatcggtcttccccctggcaccctcctccaagagcacctctgggggcacagcggccctgggctgcctggtcaaggactacttccccgaaccggtgacggtgtcgtggaactcaggcgccctgaccagcggcgtgcacaccttcccggctgtcctacagtcctcaggactctactccctcagcagcgtggtgaccgtgccctccagcagcttgggcacccagacctacatctgcaacgtgaatcacaagcccagcaacaccaaggtggacaagaaagttgagcccaaatcttgtgacaaaactcacacatgcccaccgtgcccagcacctgaactcctggggggaccgtcagtcttcctcttccccccaaaacccaaggacaccctcatgatctcccggacccctgaggtcacatgcgtggtggtggacgtgagccacgaagaccctgaggtcaagttcaactggtacgtggacggcgtggaggtgcataatgccaagacaaagccgtgtgaggagcagtacggcagcacgtaccgttgtgtcagcgtcctcaccgtcctgcaccaggactggctgaatggcaaggagtacaagtgcaaggtctccaacaaagccctcccagcccccatcgagaaaaccatctccaaagccaaagggcagccccgagaaccacaggtgtacaccctgcccccatcccgggaggagatgaccaagaaccaggtcagcctgacctgcctggtcaaaggcttctatcccagcgacatcgccgtggagtgggagagcaatgggcagccggagaacaactacaagaccacgcctcccgtgctggactccgacggctccttcttcctctatagcaagctcaccgtggacaagagcaggtggcagcaggggaacgtcttctcatgctccgtgatgcatgaggctctgcacaaccactacacgcagaagagcctctccctgtctccgggtaaa

SEQ ID NO: 2063 - DNA, 1353 bp, synthetic construct; identical to SEQ ID NO: 2062
  misc_feature 1..1353: note = source = /note="Description of Artificial Sequence: Synthetic polynucleotide"
  source 1..1353: mol_type = other DNA

SEQ ID NO: 2064 - DNA, 1353 bp, synthetic construct; identical to SEQ ID NO: 2062
  misc_feature 1..1353: note = source = /note="Description of Artificial Sequence: Synthetic polynucleotide"
  source 1..1353: mol_type = other DNA

SEQ ID NO: 2065 - DNA, 1353 bp, synthetic construct
  misc_feature 1..1353: note = source = /note="Description of Artificial Sequence: Synthetic polynucleotide"
  source 1..1353: mol_type = other DNA
caggtgcagctggtggagtctgggggaggcgtggtccagcctgggaggtccctgagactctcctgtgcagcgtctggattcactttcagtaactttggcatgcactgggtccgccaggctccaggcaaggggctggagtgggtggcagttatatggtatgatgcaagtaatgaaaactatgcagactccgtgaagggccgattcaccatctccagagacaattccaagaatacgctgtatctgcacatgaacagcctgagagtcgcggacacggctgtgtattattgtgcgcgagatgggacgatctttggagtggtcttgggggactactggggccagggaaccctggtcaccgtctcctcagcctccaccaagggcccatcggtcttccccctggcaccctcctccaagagcacctctgggggcacagcggccctgggctgcctggtcaaggactacttccccgaaccggtgacggtgtcgtggaactcaggcgccctgaccagcggcgtgcacaccttcccggctgtcctacagtcctcaggactctactccctcagcagcgtggtgaccgtgccctccagcagcttgggcacccagacctacatctgcaacgtgaatcacaagcccagcaacaccaaggtggacaagaaagttgagcccaaatcttgtgacaaaactcacacatgcccaccgtgcccagcacctgaactcctggggggaccgtcagtcttcctcttccccccaaaacccaaggacaccctcatgatctcccggacccctgaggtcacatgcgtggtggtggacgtgagccacgaagaccctgaggtcaagttcaactggtacgtggacggcgtggaggtgcataatgccaagacaaagccgtgtgaggagcagtacggcagcacgtaccgttgtgtcagcgtcctcaccgtcctgcaccaggactggctgaatggcaaggagtacaagtgcaaggtctccaacaaagccctcccagcccccatcgagaaaaccatctccaaagccaaagggcagccccgagaaccacaggtgtacaccctgcccccatcccgggaggagatgaccaagaaccaggtcagcctgacctgcctggtcaaaggcttctatcccagcgacatcgccgtggagtgggagagcaatgggcagccggagaacaactacaagaccacgcctcccgtgctggactccgacggctccttcttcctctatagcaagctcaccgtggacaagagcaggtggcagcaggggaacgtcttctcatgctccgtgatgcatgaggctctgcacaaccactacacgcagaagagcctctccctgtctccgggtaaa

SEQ ID NO: 2066 - DNA, 1353 bp, synthetic construct
  misc_feature 1..1353: note = source = /note="Description of Artificial Sequence: Synthetic polynucleotide"
  source 1..1353: mol_type = other DNA
caggtgcagctggtggagtctgggggaggcgtggtccagcctgggaggtccctgagactctcctgtgcagcgtctggattcactttcagtaactttggcatgcactgggtccgccaggctccaggcaaggggctggagtgggtggcagttatatggtatgatggaagtaatgaaaactatgcagacgccgtgaagggccgattcaccatctccagagacaattccaagaatacgctgtatctgcacatgaacagcctgagagtcgcggacacggctgtgtattattgtgcgcgagatgggacgatctttggagtggtcttgggggactactggggccagggaaccctggtcaccgtctcctcagcctccaccaagggcccatcggtcttccccctggcaccctcctccaagagcacctctgggggcacagcggccctgggctgcctggtcaaggactacttccccgaaccggtgacggtgtcgtggaactcaggcgccctgaccagcggcgtgcacaccttcccggctgtcctacagtcctcaggactctactccctcagcagcgtggtgaccgtgccctccagcagcttgggcacccagacctacatctgcaacgtgaatcacaagcccagcaacaccaaggtggacaagaaagttgagcccaaatcttgtgacaaaactcacacatgcccaccgtgcccagcacctgaactcctggggggaccgtcagtcttcctcttccccccaaaacccaaggacaccctcatgatctcccggacccctgaggtcacatgcgtggtggtggacgtgagccacgaagaccctgaggtcaagttcaactggtacgtggacggcgtggaggtgcataatgccaagacaaagccgtgtgaggagcagtacggcagcacgtaccgttgtgtcagcgtcctcaccgtcctgcaccaggactggctgaatggcaaggagtacaagtgcaaggtctccaacaaagccctcccagcccccatcgagaaaaccatctccaaagccaaagggcagccccgagaaccacaggtgtacaccctgcccccatcccgggaggagatgaccaagaaccaggtcagcctgacctgcctggtcaaaggcttctatcccagcgacatcgccgtggagtgggagagcaatgggcagccggagaacaactacaagaccacgcctcccgtgctggactccgacggctccttcttcctctatagcaagctcaccgtggacaagagcaggtggcagcaggggaacgtcttctcatgctccgtgatgcatgaggctctgcacaaccactacacgcagaagagcctctccctgtctccgggtaaa

SEQ ID NO: 2067 - DNA, 1353 bp, synthetic construct
  misc_feature 1..1353: note = source = /note="Description of Artificial Sequence: Synthetic polynucleotide"
  source 1..1353: mol_type = other DNA
caggtgcagctggtggagtctgggggaggcgtggtccagcctgggaggtccctgagactctcctgtgcagcgtctggattcactttcagtaactttggcatgcactgggtccgccaggctccaggcaaggggctggagtgggtggcagttatatggtatgatgcaagtaatgaaaactatgcagacgccgtgaagggccgattcaccatctccagagacaattccaagaatacgctgtatctgcaaatgaacagcctgagagtcgaggacacggctgtgtattattgtgcgcgagataggacgatctttggagtggtcttgggggactactggggccagggaaccctggtcaccgtctcctcagcctccaccaagggcccatcggtcttccccctggcaccctcctccaagagcacctctgggggcacagcggccctgggctgcctggtcaaggactacttccccgaaccggtgacggtgtcgtggaactcaggcgccctgaccagcggcgtgcacaccttcccggctgtcctacagtcctcaggactctactccctcagcagcgtggtgaccgtgccctccagcagcttgggcacccagacctacatctgcaacgtgaatcacaagcccagcaacaccaaggtggacaagaaagttgagcccaaatcttgtgacaaaactcacacatgcccaccgtgcccagcacctgaactcctggggggaccgtcagtcttcctcttccccccaaaacccaaggacaccctcatgatctcccggacccctgaggtcacatgcgtggtggtggacgtgagccacgaagaccctgaggtcaagttcaactggtacgtggacggcgtggaggtgcataatgccaagacaaagccgtgtgaggagcagtacggcagcacgtaccgttgtgtcagcgtcctcaccgtcctgcaccaggactggctgaatggcaaggagtacaagtgcaaggtctccaacaaagccctcccagcccccatcgagaaaaccatctccaaagccaaagggcagccccgagaaccacaggtgtacaccctgcccccatcccgggaggagatgaccaagaaccaggtcagcctgacctgcctggtcaaaggcttctatcccagcgacatcgccgtggagtgggagagcaatgggcagccggagaacaactacaagaccacgcctcccgtgctggactccgacggctccttcttcctctatagcaagctcaccgtggacaagagcaggtggcagcaggggaacgtcttctcatgctccgtgatgcatgaggctctgcacaaccactacacgcagaagagcctctccctgtctccgggtaaa

SEQ ID NO: 2068 - DNA, 1353 bp, synthetic construct
  misc_feature 1..1353: note = source = /note="Description of Artificial Sequence: Synthetic polynucleotide"
  source 1..1353: mol_type = other DNA
caggtgcagctggtggagtctgggggaggcgtggtccagcctgggaggtccctgagactctcctgtgcagcgtctggattcactttcagtaactttggcatgcactgggtccgccaggctccaggcaaggggctggagtgggtggcagttatatggtatgatgcaagtaatgaaaactatgcagacgccgtgaagggccgattcaccatctccagagacaattccaagaatacgctgtatctgcaaatgaacagcctgagagtcgaggacacggctgtgtattattgtgcgcgagatgggacgatctttggagtggtcttgggggactactggggccagggaaccctggtcaccgtctcctcagcctccaccaagggcccatcggtcttccccctggcaccctcctccaagagcacctctgggggcacagcggccctgggctgcctggtcaaggactacttccccgaaccggtgacggtgtcgtggaactcaggcgccctgaccagcggcgtgcacaccttcccggctgtcctacagtcctcaggactctactccctcagcagcgtggtgaccgtgccctccagcagcttgggcacccagacctacatctgcaacgtgaatcacaagcccagcaacaccaaggtggacaagaaagttgagcccaaatcttgtgacaaaactcacacatgcccaccgtgcccagcacctgaactcctggggggaccgtcagtcttcctcttccccccaaaacccaaggacaccctcatgatctcccggacccctgaggtcacatgcgtggtggtggacgtgagccacgaagaccctgaggtcaagttcaactggtacgtggacggcgtggaggtgcataatgccaagacaaagccgtgtgaggagcagtacggcagcacgtaccgttgtgtcagcgtcctcaccgtcctgcaccaggactggctgaatggcaaggagtacaagtgcaaggtctccaacaaagccctcccagcccccatcgagaaaaccatctccaaagccaaagggcagccccgagaaccacaggtgtacaccctgcccccatcccgggaggagatgaccaagaaccaggtcagcctgacctgcctggtcaaaggcttctatcccagcgacatcgccgtggagtgggagagcaatgggcagccggagaacaactacaagaccacgcctcccgtgctggactccgacggctccttcttcctctatagcaagctcaccgtggacaagagcaggtggcagcaggggaacgtcttctcatgctccgtgatgcatgaggctctgcacaaccactacacgcagaagagcctctccctgtctccgggtaaa

SEQ ID NO: 2069 - DNA, 1353 bp, synthetic construct
  misc_feature 1..1353: note = source = /note="Description of Artificial Sequence: Synthetic polynucleotide"
  source 1..1353: mol_type = other DNA
caggtgcagctggtggagtctgggggaggcgtggtccagcctgggaggtccctgagactctcctgtgcagcgtctggattcactttcagtaactttggcatgcactgggtccgccaggccccaggcaaggggctggagtgggtggcagttatatggtatgatggaagtaatgaaaactatgcagactccgtgaagggccgattcaccatctccagagacaattccaagaacacgctgtatctgcacatgaacagcctgagagccgcggacacggctgtgtattactgtgcgagagatgggacgatctttggagtggtcttgggggactactggggccagggaaccctggtcaccgtctcctcagcctccaccaagggcccatcggtcttccccctggcaccctcctccaagagcacctctgggggcacagcggccctgggctgcctggtcaaggactacttccccgaaccggtgacggtgtcgtggaactcaggcgccctgaccagcggcgtgcacaccttcccggctgtcctacagtcctcaggactctactccctcagcagcgtggtgaccgtgccctccagcagcttgggcacccagacctacatctgcaacgtgaatcacaagcccagcaacaccaaggtggacaagaaagttgagcccaaatcttgtgacaaaactcacacatgcccaccgtgcccagcacctgaactcctggggggaccgtcagtcttcctcttccccccaaaacccaaggacaccctcatgatctcccggacccctgaggtcacatgcgtggtggtggacgtgagccacgaagaccctgaggtcaagttcaactggtacgtggacggcgtggaggtgcataatgccaagacaaagccgtgtgaggagcagtacggcagcacgtaccgttgtgtcagcgtcctcaccgtcctgcaccaggactggctgaatggcaaggagtacaagtgcaaggtctccaacaaagccctcccagcccccatcgagaaaaccatctccaaagccaaagggcagccccgagaaccacaggtgtacaccctgcccccatcccgggaggagatgaccaagaaccaggtcagcctgacctgcctggtcaaaggcttctatcccagcgacatcgccgtggagtgggagagcaatgggcagccggagaacaactacaagaccacgcctcccgtgctggactccgacggctccttcttcctctatagcaagctcaccgtggacaagagcaggtggcagcaggggaacgtcttctcatgctccgtgatgcatgaggctctgcacaaccactacacgcagaagagcctctccctgtctccgggtaaa

SEQ ID NO: 2070 - DNA, 1353 bp, synthetic construct
  misc_feature 1..1353: note = source = /note="Description of Artificial Sequence: Synthetic polynucleotide"
  source 1..1353: mol_type = other DNA
caggtgcagctggtggagtctgggggaggcgtggtccagcctgggaggtccctgagactctcctgtgcagcgtctggattcactttcagtaactttggcatgcactgggtccgccaggccccaggcaaggggctggagtgggtggcagttatatggtatgatgcaagtaatgaaaactatgcagacgccgtgaagggccgattcaccatctccagagacaattccaagaacacgctgtatctgcaaatgaacagcctgagagccgcggacacggctgtgtattactgtgcgagagatgggacgatctttggagtggtcttgggggactactggggccagggaaccctggtcaccgtctcctcagcctccaccaagggcccatcggtcttccccctggcaccctcctccaagagcacctctgggggcacagcggccctgggctgcctggtcaaggactacttccccgaaccggtgacggtgtcgtggaactcaggcgccctgaccagcggcgtgcacaccttcccggctgtcctacagtcctcaggactctactccctcagcagcgtggtgaccgtgccctccagcagcttgggcacccagacctacatctgcaacgtgaatcacaagcccagcaacaccaaggtggacaagaaagttgagcccaaatcttgtgacaaaactcacacatgcccaccgtgcccagcacctgaactcctggggggaccgtcagtcttcctcttccccccaaaacccaaggacaccctcatgatctcccggacccctgaggtcacatgcgtggtggtggacgtgagccacgaagaccctgaggtcaagttcaactggtacgtggacggcgtggaggtgcataatgccaagacaaagccgtgtgaggagcagtacggcagcacgtaccgttgtgtcagcgtcctcaccgtcctgcaccaggactggctgaatggcaaggagtacaagtgcaaggtctccaacaaagccctcccagcccccatcgagaaaaccatctccaaagccaaagggcagccccgagaaccacaggtgtacaccctgcccccatcccgggaggagatgaccaagaaccaggtcagcctgacctgcctggtcaaaggcttctatcccagcgacatcgccgtggagtgggagagcaatgggcagccggagaacaactacaagaccacgcctcccgtgctggactccgacggctccttcttcctctatagcaagctcaccgtggacaagagcaggtggcagcaggggaacgtcttctcatgctccgtgatgcatgaggctctgcacaaccactacacgcagaagagcctctccctgtctccgggtaaa

SEQ ID NO: 2071 - DNA, 1353 bp, synthetic construct
  misc_feature 1..1353: note = source = /note="Description of Artificial Sequence: Synthetic polynucleotide"
  source 1..1353: mol_type = other DNA
caggtgcagctggtggagtctgggggaggcgtggtccagcctgggaggtccctgagactctcctgtgcagcgtctggattcactttcagtaactttggcatgcactgggtccgccaggccccaggcaaggggctggagtgggtggcagttatatggtatgatgcaagtaatgaaaactatgcagacgccgtgaagggccgattcaccatctccagagacaattccaagaacacgctgtatctgcacatgaacagcctgagagccgcggacacggctgtgtattactgtgcgagagatgggacgatctttggagtggtcttgggggactactggggccagggaaccctggtcaccgtctcctcagcctccaccaagggcccatcggtcttccccctggcaccctcctccaagagcacctctgggggcacagcggccctgggctgcctggtcaaggactacttccccgaaccggtgacggtgtcgtggaactcaggcgccctgaccagcggcgtgcacaccttcccggctgtcctacagtcctcaggactctactccctcagcagcgtggtgaccgtgccctccagcagcttgggcacccagacctacatctgcaacgtgaatcacaagcccagcaacaccaaggtggacaagaaagttgagcccaaatcttgtgacaaaactcacacatgcccaccgtgcccagcacctgaactcctggggggaccgtcagtcttcctcttccccccaaaacccaaggacaccctcatgatctcccggacccctgaggtcacatgcgtggtggtggacgtgagccacgaagaccctgaggtcaagttcaactggtacgtggacggcgtggaggtgcataatgccaagacaaagccgtgtgaggagcagtacggcagcacgtaccgttgtgtcagcgtcctcaccgtcctgcaccaggactggctgaatggcaaggagtacaagtgcaaggtctccaacaaagccctcccagcccccatcgagaaaaccatctccaaagccaaagggcagccccgagaaccacaggtgtacaccctgcccccatcccgggaggagatgaccaagaaccaggtcagcctgacctgcctggtcaaaggcttctatcccagcgacatcgccgtggagtgggagagcaatgggcagccggagaacaactacaagaccacgcctcccgtgctggactccgacggctccttcttcctctatagcaagctcaccgtggacaagagcaggtggcagcaggggaacgtcttctcatgctccgtgatgcatgaggctctgcacaaccactacacgcagaagagcctctccctgtctccgggtaaa

SEQ ID NO: 2072 - DNA, 1353 bp, synthetic construct; identical to SEQ ID NO: 2070
  misc_feature 1..1353: note = source = /note="Description of Artificial Sequence: Synthetic polynucleotide"
  source 1..1353: mol_type = other DNA

SEQ ID NO: 2073 - DNA, 1353 bp, synthetic construct; identical to SEQ ID NO: 2070
  misc_feature 1..1353: note = source = /note="Description of Artificial Sequence: Synthetic polynucleotide"
  source 1..1353: mol_type = other DNA

SEQ ID NO: 2074 - DNA, 1353 bp, synthetic construct; identical to SEQ ID NO: 2071
  misc_feature 1..1353: note = source = /note="Description of Artificial Sequence: Synthetic polynucleotide"
  source 1..1353: mol_type = other DNA

SEQ ID NO: 2075 - DNA, 1353 bp, synthetic construct; identical to SEQ ID NO: 2071
  misc_feature 1..1353: note = source = /note="Description of Artificial Sequence: Synthetic polynucleotide"
  source 1..1353: mol_type = other DNA

SEQ ID NO: 2076 - DNA, 1353 bp, synthetic construct; identical to SEQ ID NO: 2070
  misc_feature 1..1353: note = source = /note="Description of Artificial Sequence: Synthetic polynucleotide"
  source 1..1353: mol_type = other DNA

SEQ ID NO: 2077 - DNA, 1353 bp, synthetic construct
  misc_feature 1..1353: note = source = /note="Description of Artificial Sequence: Synthetic polynucleotide"
  source 1..1353: mol_type = other DNA
caggtgcagctggtggagtctgggggaggcgtggtccagcctgggaggtccctgagactctcctgtgcagcgtctggattcactttcagtaactttggcatgcactgggtccgccaggccccaggcaaggggctggagtgggtggcagttatatggtatgatggaagtaatgaaaactatgcagacgccgtgaagggccgattcaccatctccagagacaattccaagaacacgctgtatctgcaaatgaacagcctgagagccgcggacacggctgtgtattactgtgcgagagatgggacgatctttggagtggtcttgggggactactggggccagggaaccctggtcaccgtctcctcagcctccaccaagggcccatcggtcttccccctggcaccctcctccaagagcacctctgggggcacagcggccctgggctgcctggtcaaggactacttccccgaaccggtgacggtgtcgtggaactcaggcgccctgaccagcggcgtgcacaccttcccggctgtcctacagtcctcaggactctactccctcagcagcgtggtgaccgtgccctccagcagcttgggcacccagacctacatctgcaacgtgaatcacaagcccagcaacaccaaggtggacaagaaagttgagcccaaatcttgtgacaaaactcacacatgcccaccgtgcccagcacctgaactcctggggggaccgtcagtcttcctcttccccccaaaacccaaggacaccctcatgatctcccggacccctgaggtcacatgcgtggtggtggacgtgagccacgaagaccctgaggtcaagttcaactggtacgtggacggcgtggaggtgcataatgccaagacaaagccgtgtgaggagcagtacggcagcacgtaccgttgtgtcagcgtcctcaccgtcctgcaccaggactggctgaatggcaaggagtacaagtgcaaggtctccaacaaagccctcccagcccccatcgagaaaaccatctccaaagccaaagggcagccccgagaaccacaggtgtacaccctgcccccatcccgggaggagatgaccaagaaccaggtcagcctgacctgcctggtcaaaggcttctatcccagcgacatcgccgtggagtgggagagcaatgggcagccggagaacaactacaagaccacgcctcccgtgctggactccgacggctccttcttcctctatagcaagctcaccgtggacaagagcaggtggcagcaggggaacgtcttctcatgctccgtgatgcatgaggctctgcacaaccactacacgcagaagagcctctccctgtctccgggtaaa

SEQ ID NO: 2078 - DNA, 1353 bp, synthetic construct
  misc_feature 1..1353: note = source = /note="Description of Artificial Sequence: Synthetic polynucleotide"
  source 1..1353: mol_type = other DNA
caggtgcagctggtggagtctgggggaggcgtggtccagcctgggaggtccctgagactctcctgtgcagcgtctggattcactttcagtaactttggcatgcactgggtccgccaggccccaggcaaggggctggagtgggtggcagttatatggtatgatgcaagtaatgaaaactatgcagactccgtgaagggccgattcaccatctccagagacaattccaagaacacgctgtatctgcaaatgaacagcctgagagccgcggacacggctgtgtattactgtgcgagagatgggacgatctttggagtggtcttgggggactactggggccagggaaccctggtcaccgtctcctcagcctccaccaagggcccatcggtcttccccctggcaccctcctccaagagcacctctgggggcacagcggccctgggctgcctggtcaaggactacttccccgaaccggtgacggtgtcgtggaactcaggcgccctgaccagcggcgtgcacaccttcccggctgtcctacagtcctcaggactctactccctcagcagcgtggtgaccgtgccctccagcagcttgggcacccagacctacatctgcaacgtgaatcacaagcccagcaacaccaaggtggacaagaaagttgagcccaaatcttgtgacaaaactcacacatgcccaccgtgcccagcacctgaactcctggggggaccgtcagtcttcctcttccccccaaaacccaaggacaccctcatgatctcccggacccctgaggtcacatgcgtggtggtggacgtgagccacgaagaccctgaggtcaagttcaactggtacgtggacggcgtggaggtgcataatgccaagacaaagccgtgtgaggagcagtacggcagcacgtaccgttgtgtcagcgtcctcaccgtcctgcaccaggactggctgaatggcaaggagtacaagtgcaaggtctccaacaaagccctcccagcccccatcgagaaaaccatctccaaagccaaagggcagccccgagaaccacaggtgtacaccctgcccccatcccgggaggagatgaccaagaaccaggtcagcctgacctgcctggtcaaaggcttctatcccagcgacatcgccgtggagtgggagagcaatgggcagccggagaacaactacaagaccacgcctcccgtgctggactccgacggctccttcttcctctatagcaagctcaccgtggacaagagcaggtggcagcaggggaacgtcttctcatgctccgtgatgcatgaggctctgcacaaccactacacgcagaagagcctctccctgtctccgggtaaa

SEQ ID NO: 2079 - DNA, 1353 bp, synthetic construct
  misc_feature 1..1353: note = source = /note="Description of Artificial Sequence: Synthetic polynucleotide"
  source 1..1353: mol_type = other DNA
caggtgcagctggtggagtctgggggaggcgtggtccagcctgggaggtccctgagactctcctgtgcagcgtctggattcactttcagtaactttggcatgcactgggtccgccaggccccaggcaaggggctggagtgggtggcagttatatggtatgatgcaagtaatgaaaactatgcagacgccgtgaagggccgattcaccatctccagagacaattccaagaacacgctgtatctgcaaatgaacagcctgagagccgaggacacggctgtgtattactgtgcgagagataggacgatctttggagtggtcttgggggactactggggccagggaaccctggtcaccgtctcctcagcctccaccaagggcccatcggtcttccccctggcaccctcctccaagagcacctctgggggcacagcggccctgggctgcctggtcaaggactacttccccgaaccggtgacggtgtcgtggaactcaggcgccctgaccagcggcgtgcacaccttcccggctgtcctacagtcctcaggactctactccctcagcagcgtggtgaccgtgccctccagcagcttgggcacccagacctacatctgcaacgtgaatcacaagcccagcaacaccaaggtggacaagaaagttgagcccaaatcttgtgacaaaactcacacatgcccaccgtgcccagcacctgaactcctggggggaccgtcagtcttcctcttccccccaaaacccaaggacaccctcatgatctcccggacccctgaggtcacatgcgtggtggtggacgtgagccacgaagaccctgaggtcaagttcaactggtacgtggacggcgtggaggtgcataatgccaagacaaagccgtgtgaggagcagtacggcagcacgtaccgttgtgtcagcgtcctcaccgtcctgcaccaggactggctgaatggcaaggagtacaagtgcaaggtctccaacaaagccctcccagcccccatcgagaaaaccatctccaaagccaaagggcagccccgagaaccacaggtgtacaccctgcccccatcccgggaggagatgaccaagaaccaggtcagcctgacctgcctggtcaaaggcttctatcccagcgacatcgccgtggagtgggagagcaatgggcagccggagaacaactacaagaccacgcctcccgtgctggactccgacggctccttcttcctctatagcaagctcaccgtggacaagagcaggtggcagcaggggaacgtcttctcatgctccgtgatgcatgaggctctgcacaaccactacacgcagaagagcctctccctgtctccgggtaaa

SEQ ID NO: 2080 - DNA, 1353 bp, synthetic construct
  misc_feature 1..1353: note = source = /note="Description of Artificial Sequence: Synthetic polynucleotide"
  source 1..1353: mol_type = other DNA
caggtgcagctggtggagtctgggggaggcgtggtccagcctgggaggtccctgagactctcctgtgcagcgtctggattcactttcagtaactttggcatgcactgggtccgccaggccccaggcaaggggctggagtgggtggcagttatatggtatgatgcaagtaatgaaaactatgcagacgccgtgaagggccgattcaccatctccagagacaattccaagaacacgctgtatctgcaaatgaacagcctgagagccgaggacacggctgtgtattactgtgcgagagatgggacgatctttggagtggtcttgggggactactggggccagggaaccctggtcaccgtctcctcagcctccaccaagggcccatcggtcttccccctggcaccctcctccaagagcacctctgggggcacagcggccctgggctgcctggtcaaggactacttccccgaaccggtgacggtgtcgtggaactcaggcgccctgaccagcggcgtgcacaccttcccggctgtcctacagtcctcaggactctactccctcagcagcgtggtgaccgtgccctccagcagcttgggcacccagacctacatctgcaacgtgaatcacaagcccagcaacaccaaggtggacaagaaagttgagcccaaatcttgtgacaaaactcacacatgcccaccgtgcccagcacctgaactcctggggggaccgtcagtcttcctcttccccccaaaacccaaggacaccctcatgatctcccggacccctgaggtcacatgcgtggtggtggacgtgagccacgaagaccctgaggtcaagttcaactggtacgtggacggcgtggaggtgcataatgccaagacaaagccgtgtgaggagcagtacggcagcacgtaccgttgtgtcagcgtcctcaccgtcctgcaccaggactggctgaatggcaaggagtacaagtgcaaggtctccaacaaagccctcccagcccccatcgagaaaaccatctccaaagccaaagggcagccccgagaaccacaggtgtacaccctgcccccatcccgggaggagatgaccaagaaccaggtcagcctgacctgcctggtcaaaggcttctatcccagcgacatcgccgtggagtgggagagcaatgggcagccggagaacaactacaagaccacgcctcccgtgctggactccgacggctccttcttcctctatagcaagctcaccgtggacaagagcaggtggcagcaggggaacgtcttctcatgctccgtgatgcatgaggctctgcacaaccactacacgcagaagagcctctccctgtctccgggtaaa

SEQ ID NO: 2081 - DNA, 1350 bp, synthetic construct
  misc_feature 1..1350: note = source = /note="Description of Artificial Sequence: Synthetic polynucleotide"
  source 1..1350: mol_type = other DNA
caggtgcaactggtggagtctgggggaggcgtggtccagcctgggaggtccctgagactctcctgtgcagcgtctggattcaccttcagtagctatggcatgcactgggtccgccaggctccaggcaaggggctggagtgggtggcagttatatggtatgatgcaagtaataaatactatgcagacgccgtgaagggccgattcaccatctccagggacaattccaagaacacgctgtatctgcaaatgaacagcctgagagccgaggacacggctgtgtattactgtgcgagagataggacgatttttggagtggttcttgactactggggccagggaaccctggtcaccgtctcctcagcctccaccaagggcccatcggtcttccccctggcaccctcctccaagagcacctctgggggcacagcggccctgggctgcctggtcaaggactacttccccgaaccggtgacggtgtcgtggaactcaggcgccctgaccagcggcgtgcacaccttcccggctgtcctacagtcctcaggactctactccctcagcagcgtggtgaccgtgccctccagcagcttgggcacccagacctacatctgcaacgtgaatcacaagcccagcaacaccaaggtggacaagaaagttgagcccaaatcttgtgacaaaactcacacatgcccaccgtgcccagcacctgaactcctggggggaccgtcagtcttcctcttccccccaaaacccaaggacaccctcatgatctcccggacccctgaggtcacatgcgtggtggtggacgtgagccacgaagaccctgaggtcaagttcaactggtacgtggacggcgtggaggtgcataatgccaagacaaagccgtgtgaggagcagtacggcagcacgtaccgttgtgtcagcgtcctcaccgtcctgcaccaggactggctgaatggcaaggagtacaagtgcaaggtctccaacaaagccctcccagcccccatcgagaaaaccatctccaaagccaaagggcagccccgagaaccacaggtgtacaccctgcccccatcccgggaggagatgaccaagaaccaggtcagcctgacctgcctggtcaaaggcttctatcccagcgacatcgccgtggagtgggagagcaatgggcagccggagaacaactacaagaccacgcctcccgtgctggactccgacggctccttcttcctctatagcaagctcaccgtggacaagagcaggtggcagcaggggaacgtcttctcatgctccgtgatgcatgaggctctgcacaaccactacacgcagaagagcctctccctgtctccgggtaaa

SEQ ID NO: 2082 - DNA, 1350 bp, synthetic construct
  misc_feature 1..1350: note = source = /note="Description of Artificial Sequence: Synthetic polynucleotide"
  source 1..1350: mol_type = other DNA
caggtgcaactggtggagtctgggggaggcgtggtccagcctgggaggtccctgagactctcctgtgcagcgtctggattcaccttcagtagctatggcatgcactgggtccgccaggctccaggcaaggggctggagtgggtggcagttatatggtatgatgcaagtaataaatactatgcagacgccgtgaagggccgattcaccatctccagcgacaattccaagaacacgctgtatctgcaaatgaacagcctgagagccgaggacacggctgtgtattactgtgcgagagataggacgatttttggagtggttcttgactactggggccagggaaccctggtcaccgtctcctcagcctccaccaagggcccatcggtcttccccctggcaccctcctccaagagcacctctgggggcacagcggccctgggctgcctggtcaaggactacttccccgaaccggtgacggtgtcgtggaactcaggcgccctgaccagcggcgtgcacaccttcccggctgtcctacagtcctcaggactctactccctcagcagcgtggtgaccgtgccctccagcagcttgggcacccagacctacatctgcaacgtgaatcacaagcccagcaacaccaaggtggacaagaaagttgagcccaaatcttgtgacaaaactcacacatgcccaccgtgcccagcacctgaactcctggggggaccgtcagtcttcctcttccccccaaaacccaaggacaccctcatgatctcccggacccctgaggtcacatgcgtggtggtggacgtgagccacgaagaccctgaggtcaagttcaactggtacgtggacggcgtggaggtgcataatgccaagacaaagccgtgtgaggagcagtacggcagcacgtaccgttgtgtcagcgtcctcaccgtcctgcaccaggactggctgaatggcaaggagtacaagtgcaaggtctccaacaaagccctcccagcccccatcgagaaaaccatctccaaagccaaagggcagccccgagaaccacaggtgtacaccctgcccccatcccgggaggagatgaccaagaaccaggtcagcctgacctgcctggtcaaaggcttctatcccagcgacatcgccgtggagtgggagagcaatgggcagccggagaacaactacaagaccacgcctcccgtgctggactccgacggctccttcttcctctatagcaagctcaccgtggacaagagcaggtggcagcaggggaacgtcttctcatgctccgtgatgcatgaggctctgcacaaccactacacgcagaagagcctctccctgtctccgggtaaa

SEQ ID NO: 2083 - DNA, 1350 bp, synthetic construct; identical to SEQ ID NO: 2081
  misc_feature 1..1350: note = source = /note="Description of Artificial Sequence: Synthetic polynucleotide"
  source 1..1350: mol_type = other DNA

SEQ ID NO: 2084 - DNA, 1350 bp, synthetic construct; identical to SEQ ID NO: 2081
  misc_feature 1..1350: note = source = /note="Description of Artificial Sequence: Synthetic polynucleotide"
  source 1..1350: mol_type = other DNA

SEQ ID NO: 2085 - DNA, 1350 bp, synthetic construct; identical to SEQ ID NO: 2082
  misc_feature 1..1350: note = source = /note="Description of Artificial Sequence: Synthetic polynucleotide"
  source 1..1350: mol_type = other DNA

SEQ ID NO: 2086 - DNA, 1350 bp, synthetic construct; identical to SEQ ID NO: 2082
  misc_feature 1..1350: note = source = /note="Description of Artificial Sequence: Synthetic polynucleotide"
  source 1..1350: mol_type = other DNA

SEQ ID NO: 2087 - DNA, 1350 bp, synthetic construct; identical to SEQ ID NO: 2081
  misc_feature 1..1350: note = source = /note="Description of Artificial Sequence: Synthetic polynucleotide"
  source 1..1350: mol_type = other DNA

SEQ ID NO: 2088 - DNA, 1350 bp, synthetic construct
  misc_feature 1..1350: note = source = /note="Description of Artificial Sequence: Synthetic polynucleotide"
  source 1..1350: mol_type = other DNA
caggtgcaactggtggagtctgggggaggcgtggtccagcctgggaggtccctgagactctcctgtgcagcgtctggattcaccttcagtagctatggcatgcactgggtccgccaggctccaggcaaggggctggagtgggtggcagttatatggtatgatgcaagtaataaatactatgcagactccgtgaagggccgattcaccatctccagggacaattccaagaacacgctgtatctgcaaatgaacagcctgagagccgaggacacggctgtgtattactgtgcgagagataggacgatttttggagtggttcttgactactggggccagggaaccctggtcaccgtctcctcagcctccaccaagggcccatcggtcttccccctggcaccctcctccaagagcacctctgggggcacagcggccctgggctgcctggtcaaggactacttccccgaaccggtgacggtgtcgtggaactcaggcgccctgaccagcggcgtgcacaccttcccggctgtcctacagtcctcaggactctactccctcagcagcgtggtgaccgtgccctccagcagcttgggcacccagacctacatctgcaacgtgaatcacaagcccagcaacaccaaggtggacaagaaagttgagcccaaatcttgtgacaaaactcacacatgcccaccgtgcccagcacctgaactcctggggggaccgtcagtcttcctcttccccccaaaacccaaggacaccctcatgatctcccggacccctgaggtcacatgcgtggtggtggacgtgagccacgaagaccctgaggtcaagttcaactggtacgtggacggcgtggaggtgcataatgccaagacaaagccgtgtgaggagcagtacggcagcacgtaccgttgtgtcagcgtcctcaccgtcctgcaccaggactggctgaatggcaaggagtacaagtgcaaggtctccaacaaagccctcccagcccccatcgagaaaaccatctccaaagccaaagggcagccccgagaaccacaggtgtacaccctgcccccatcccgggaggagatgaccaagaaccaggtcagcctgacctgcctggtcaaaggcttctatcccagcgacatcgccgtggagtgggagagcaatgggcagccggagaacaactacaagaccacgcctcccgtgctggactccgacggctccttcttcctctatagcaagctcaccgtggacaagagcaggtggcagcaggggaacgtcttctcatgctccgtgatgcatgaggctctgcacaaccactacacgcagaagagcctctccctgtctccgggtaaa

SEQ ID NO: 2089 - DNA, 1350 bp, synthetic construct
  misc_feature 1..1350: note = source = /note="Description of Artificial Sequence: Synthetic polynucleotide"
  source 1..1350: mol_type = other DNA
caggtgcaactggtggagtctgggggaggcgtggtccagcctgggaggtccctgagactctcctgtgcagcgtctggattcaccttcagtagctatggcatgcactgggtccgccaggctccaggcaaggggctggagtgggtggcagttatatggtatgatggaagtaataaatactatgcagacgccgtgaagggccgattcaccatctccagggacaattccaagaacacgctgtatctgcaaatgaacagcctgagagccgaggacacggctgtgtattactgtgcgagagataggacgatttttggagtggttcttgactactggggccagggaaccctggtcaccgtctcctcagcctccaccaagggcccatcggtcttccccctggcaccctcctccaagagcacctctgggggcacagcggccctgggctgcctggtcaaggactacttccccgaaccggtgacggtgtcgtggaactcaggcgccctgaccagcggcgtgcacaccttcccggctgtcctacagtcctcaggactctactccctcagcagcgtggtgaccgtgccctccagcagcttgggcacccagacctacatctgcaacgtgaatcacaagcccagcaacaccaaggtggacaagaaagttgagcccaaatcttgtgacaaaactcacacatgcccaccgtgcccagcacctgaactcctggggggaccgtcagtcttcctcttccccccaaaacccaaggacaccctcatgatctcccggacccctgaggtcacatgcgtggtggtggacgtgagccacgaagaccctgaggtcaagttcaactggtacgtggacggcgtggaggtgcataatgccaagacaaagccgtgtgaggagcagtacggcagcacgtaccgttgtgtcagcgtcctcaccgtcctgcaccaggactggctgaatggcaaggagtacaagtgcaaggtctccaacaaagccctcccagcccccatcgagaaaaccatctccaaagccaaagggcagccccgagaaccacaggtgtacaccctgcccccatcccgggaggagatgaccaagaaccaggtcagcctgacctgcctggtcaaaggcttctatcccagcgacatcgccgtggagtgggagagcaatgggcagccggagaacaactacaagaccacgcctcccgtgctggactccgacggctccttcttcctctatagcaagctcaccgtggacaagagcaggtggcagcaggggaacgtcttctcatgctccgtgatgcatgaggctctgcacaaccactacacgcagaagagcctctccctgtctccgggtaaa

SEQ ID NO: 2090 - DNA, 1353 bp, synthetic construct; identical to SEQ ID NO: 2056
  misc_feature 1..1353: note = source = /note="Description of Artificial Sequence: Synthetic polynucleotide"
  source 1..1353: mol_type = other DNA

SEQ ID NO: 2091 - DNA, 1353 bp, synthetic construct; identical to SEQ ID NO: 2061
  misc_feature 1..1353: note = source = /note="Description of Artificial Sequence: Synthetic polynucleotide"
  source 1..1353: mol_type = other DNA

SEQ ID NO: 2092 - DNA, 1353 bp, synthetic construct; identical to SEQ ID NO: 2056
  misc_feature 1..1353: note = source = /note="Description of Artificial Sequence: Synthetic polynucleotide"
  source 1..1353: mol_type = other DNA

SEQ ID NO: 2093 - DNA, 1353 bp, synthetic construct; identical to SEQ ID NO: 2061
  misc_feature 1..1353: note = source = /note="Description of Artificial Sequence: Synthetic polynucleotide"
  source 1..1353: mol_type = other DNA

SEQ ID NO: 2094 - DNA, 1353 bp, synthetic construct; identical to SEQ ID NO: 2044
  misc_feature 1..1353: note = source = /note="Description of Artificial Sequence: Synthetic polynucleotide"
  source 1..1353: mol_type = other DNA

SEQ ID NO: 2095 - DNA, 1353 bp, synthetic construct; identical to SEQ ID NO: 2057
  misc_feature 1..1353: note = source = /note="Description of Artificial Sequence: Synthetic polynucleotide"
  source 1..1353: mol_type = other DNA

SEQ ID NO: 2096 - DNA, 1353 bp, synthetic construct; identical to SEQ ID NO: 2058
  misc_feature 1..1353: note = source = /note="Description of Artificial Sequence: Synthetic polynucleotide"
  source 1..1353: mol_type = other DNA

SEQ ID NO: 2097 - DNA, 1350 bp, synthetic construct
  misc_feature 1..1350: note = source = /note="Description of Artificial Sequence: Synthetic polynucleotide"
  source 1..1350: mol_type = other DNA
caggtgcagctggtggagtctgggggaggcgtggtccagcctgggaggtccctgagactctcctgtgcagcgtctggattctccttcagtagctatggcatgcactgggtccgccagcctccaggcaaggggctggagtgggtggcagctatatggtatgatgcaaataataaatactatgcagacgccgtgaagggccgattcaccatctccagagacagttccaagaacacgctgtatctgcaaatgaacagcctgagagccgaggacacggctgtgtattactgtgcgagagatcggacgatttttggagtggtccttgagtactggggccagggaaccctggtcaccgtctcctcagcctccaccaagggcccatcggtcttccccctggcaccctcctccaagagcacctctgggggcacagcggccctgggctgcctggtcaaggactacttccccgaaccggtgacggtgtcgtggaactcaggcgccctgaccagcggcgtgcacaccttcccggctgtcctacagtcctcaggactctactccctcagcagcgtggtgaccgtgccctccagcagcttgggcacccagacctacatctgcaacgtgaatcacaagcccagcaacaccaaggtggacaagaaagttgagcccaaatcttgtgacaaaactcacacatgcccaccgtgcccagcacctgaactcctggggggaccgtcagtcttcctcttccccccaaaacccaaggacaccctcatgatctcccggacccctgaggtcacatgcgtggtggtggacgtgagccacgaagaccctgaggtcaagttcaactggtacgtggacggcgtggaggtgcataatgccaagacaaagccgtgtgaggagcagtacggcagcacgtaccgttgtgtcagcgtcctcaccgtcctgcaccaggactggctgaatggcaaggagtacaagtgcaaggtctccaacaaagccctcccagcccccatcgagaaaaccatctccaaagccaaagggcagccccgagaaccacaggtgtacaccctgcccccatcccgggaggagatgaccaagaaccaggtcagcctgacctgcctggtcaaaggcttctatcccagcgacatcgccgtggagtgggagagcaatgggcagccggagaacaactacaagaccacgcctcccgtgctggactccgacggctccttcttcctctatagcaagctcaccgtggacaagagcaggtggcagcaggggaacgtcttctcatgctccgtgatgcatgaggctctgcacaaccactacacgcagaagagcctctccctgtctccgggtaaa

SEQ ID NO: 2098 - DNA, 1350 bp, synthetic construct; identical to SEQ ID NO: 2097
  misc_feature 1..1350: note = source = /note="Description of Artificial Sequence: Synthetic polynucleotide"
  source 1..1350: mol_type = other DNA

SEQ ID NO: 2099 - DNA, 1350 bp, synthetic construct
  misc_feature 1..1350: note = source = /note="Description of Artificial Sequence: Synthetic polynucleotide"
  source 1..1350: mol_type = other DNA
caggtgcagctggtggagtctgggggaggcgtggtccagcctgggaggtccctgagactctcctgtgcagcgtctggattctccttcagtagctatggcatgcactgggtccgccagcctccaggcaaggggctggagtgggtggcagctatatggtatgatgcaaataataaatactatgcagacgccgtgaagggccgattcaccatctccagagacagttccaagaacacgctgtatctgcaaatgaacagcctgagagccgaggacacggctgtgtattactgtgcgagagatcggacgatttttggagtggtccttgagtacctcggccagggaaccctggtcaccgtctcctcagcctccaccaagggcccatcggtcttccccctggcaccctcctccaagagcacctctgggggcacagcggccctgggctgcctggtcaaggactacttccccgaaccggtgacggtgtcgtggaactcaggcgccctgaccagcggcgtgcacaccttcccggctgtcctacagtcctcaggactctactccctcagcagcgtggtgaccgtgccctccagcagcttgggcacccagacctacatctgcaacgtgaatcacaagcccagcaacaccaaggtggacaagaaagttgagcccaaatcttgtgacaaaactcacacatgcccaccgtgcccagcacctgaactcctggggggaccgtcagtcttcctcttccccccaaaacccaaggacaccctcatgatctcccggacccctgaggtcacatgcgtggtggtggacgtgagccacgaagaccctgaggtcaagttcaactggtacgtggacggcgtggaggtgcataatgccaagacaaagccgtgtgaggagcagtacggcagcacgtaccgttgtgtcagcgtcctcaccgtcctgcaccaggactggctgaatggcaaggagtacaagtgcaaggtctccaacaaagccctcccagcccccatcgagaaaaccatctccaaagccaaagggcagccccgagaaccacaggtgtacaccctgcccccatcccgggaggagatgaccaagaaccaggtcagcctgacctgcctggtcaaaggcttctatcccagcgacatcgccgtggagtgggagagcaatgggcagccggagaacaactacaagaccacgcctcccgtgctggactccgacggctccttcttcctctatagcaagctcaccgtggacaagagcaggtggcagcaggggaacgtcttctcatgctccgtgatgcatgaggctctgcacaaccactacacgcagaagagcctctccctgtctccgggtaaa

SEQ ID NO: 2100 - DNA, 1350 bp, synthetic construct; identical to SEQ ID NO: 2097
  misc_feature 1..1350: note = source = /note="Description of Artificial Sequence: Synthetic polynucleotide"
  source 1..1350: mol_type = other DNA

SEQ ID NO: 2101 - DNA, 1350 bp, synthetic construct; identical to SEQ ID NO: 2099
  misc_feature 1..1350: note = source = /note="Description of Artificial Sequence: Synthetic polynucleotide"
  source 1..1350: mol_type = other DNA

SEQ ID NO: 2102 - DNA, 1350 bp, synthetic construct; identical to SEQ ID NO: 2099
  misc_feature 1..1350: note = source = /note="Description of Artificial Sequence: Synthetic polynucleotide"
  source 1..1350: mol_type = other DNA

SEQ ID NO: 2103 - DNA, 1350 bp, synthetic construct; identical to SEQ ID NO: 2097
  misc_feature 1..1350: note = source = /note="Description of Artificial Sequence: Synthetic polynucleotide"
  source 1..1350: mol_type = other DNA

SEQ ID NO: 2104 - DNA, 1350 bp, synthetic construct
  misc_feature 1..1350: note = source = /note="Description of Artificial Sequence: Synthetic polynucleotide"
  source 1..1350: mol_type = other DNA
caggtgcagctggtggagtctgggggaggcgtggtccagcctgggaggtccctgagactctcctgtgcagcgtctggattctccttcagtagctatggcatgcactgggtccgccagcctccaggcaaggggctggagtgggtggcagctatatggtatgatggaaataataaatactatgcagacgccgtgaagggccgattcaccatctccagagacagttccaagaacacgctgtatctgcaaatgaacagcctgagagccgaggacacggctgtgtattactgtgcgagagatcggacgatttttggagtggtccttgagtactggggccagggaaccctggtcaccgtctcctcagcctccaccaagggcccatcggtcttccccctggcaccctcctccaagagcacctctgggggcacagcggccctgggctgcctggtcaaggactacttccccgaaccggtgacggtgtcgtggaactcaggcgccctgaccagcggcgtgcacaccttcccggctgtcctacagtcctcaggactctactccctcagcagcgtggtgaccgtgccctccagcagcttgggcacccagacctacatctgcaacgtgaatcacaagcccagcaacaccaaggtggacaagaaagttgagcccaaatcttgtgacaaaactcacacatgcccaccgtgcccagcacctgaactcctggggggaccgtcagtcttcctcttccccccaaaacccaaggacaccctcatgatctcccggacccctgaggtcacatgcgtggtggtggacgtgagccacgaagaccctgaggtcaagttcaactggtacgtggacggcgtggaggtgcataatgccaagacaaagccgtgtgaggagcagtacggcagcacgtaccgttgtgtcagcgtcctcaccgtcctgcaccaggactggctgaatggcaaggagtacaagtgcaaggtctccaacaaagccctcccagcccccatcgagaaaaccatctccaaagccaaagggcagccccgagaaccacaggtgtacaccctgcccccatcccgggaggagatgaccaagaaccaggtcagcctgacctgcctggtcaaaggcttctatcccagcgacatcgccgtggagtgggagagcaatgggcagccggagaacaactacaagaccacgcctcccgtgctggactccgacggctccttcttcctctatagcaagctcaccgtggacaagagcaggtggcagcaggggaacgtcttctcatgctccgtgatgcatgaggctctgcacaaccactacacgcagaagagcctctccctgtctccgggtaaa

SEQ ID NO: 2105 - DNA, 1350 bp, synthetic construct
  misc_feature 1..1350: note = source = /note="Description of Artificial Sequence: Synthetic polynucleotide"
  source 1..1350: mol_type = other DNA
caggtgcagctggtggagtctgggggaggcgtggtccagcctgggaggtccctgagactctcctgtgcagcgtctggattctccttcagtagctatggcatgcactgggtccgccagcctccaggcaaggggctggagtgggtggcagctatatggtatgatgcaaataataaatactatgcagactccgtgaagggccgattcaccatctccagagacagttccaagaacacgctgtatctgcaaatgaacagcctgagagccgaggacacggctgtgtattactgtgcgagagatcggacgatttttggagtggtccttgagtactggggccagggaaccctggtcaccgtctcctcagcctccaccaagggcccatcggtcttccccctggcaccctcctccaagagcacctctgggggcacagcggccctgggctgcctggtcaaggactacttccccgaaccggtgacggtgtcgtggaactcaggcgccctgaccagcggcgtgcacaccttcccggctgtcctacagtcctcaggactctactccctcagcagcgtggtgaccgtgccctccagcagcttgggcacccagacctacatctgcaacgtgaatcacaagcccagcaacaccaaggtggacaagaaagttgagcccaaatcttgtgacaaaactcacacatgcccaccgtgcccagcacctgaactcctggggggaccgtcagtcttcctcttccccccaaaacccaaggacaccctcatgatctcccggacccctgaggtcacatgcgtggtggtggacgtgagccacgaagaccctgaggtcaagttcaactggtacgtggacggcgtggaggtgcataatgccaagacaaagccgtgtgaggagcagtacggcagcacgtaccgttgtgtcagcgtcctcaccgtcctgcaccaggactggctgaatggcaaggagtacaagtgcaaggtctccaacaaagccctcccagcccccatcgagaaaaccatctccaaagccaaagggcagccccgagaaccacaggtgtacaccctgcccccatcccgggaggagatgaccaagaaccaggtcagcctgacctgcctggtcaaaggcttctatcccagcgacatcgccgtggagtgggagagcaatgggcagccggagaacaactacaagaccacgcctcccgtgctggactccgacggctccttcttcctctatagcaagctcaccgtggacaagagcaggtggcagcaggggaacgtcttctcatgctccgtgatgcatgaggctctgcacaaccactacacgcagaagagcctctccctgtctccgggtaaa

SEQ ID NO: 2106 - DNA, 1350 bp, synthetic construct; identical to SEQ ID NO: 2097
  misc_feature 1..1350: note = source = /note="Description of Artificial Sequence: Synthetic polynucleotide"
  source 1..1350: mol_type = other DNA

SEQ ID NO: 2107 - DNA, 1350 bp, synthetic construct; identical to SEQ ID NO: 2099
  misc_feature 1..1350: note = source = /note="Description of Artificial Sequence: Synthetic polynucleotide"
  source 1..1350: mol_type = other DNA

SEQ ID NO: 2108 - DNA, 1350 bp, synthetic construct
  misc_feature 1..1350: note = source = /note="Description of Artificial Sequence: Synthetic polynucleotide"
  source 1..1350: mol_type = other DNA
caggtgcagctggtggagtctgggggaggcgtggtccagcctgggaggtccctgagactctcctgtgcagcgtctggattcagtttcagtagctatggcatgcactgggtccgccaggctccaggcaagggactggagtgggtggcagttatatggtatgatgcaagtaataaatactatgaagacgccgtgaagggccgattcaccatctccagagacaattccaagaacacgctgtttctgcaagtgaacagcctgagagccgaggacacggctgtgtattactgtgcgagagggattacgatttttggtcatgggtttgaatattggggccagggaaccctggtcaccgtctcctcagcctccaccaagggcccatcggtcttccccctggcaccctcctccaagagcacctctgggggcacagcggccctgggctgcctggtcaaggactacttccccgaaccggtgacggtgtcgtggaactcaggcgccctgaccagcggcgtgcacaccttcccggctgtcctacagtcctcaggactctactccctcagcagcgtggtgaccgtgccctccagcagcttgggcacccagacctacatctgcaacgtgaatcacaagcccagcaacaccaaggtggacaagaaagttgagcccaaatcttgtgacaaaactcacacatgcccaccgtgcccagcacctgaactcctggggggaccgtcagtcttcctcttccccccaaaacccaaggacaccctcatgatctcccggacccctgaggtcacatgcgtggtggtggacgtgagccacgaagaccctgaggtcaagttcaactggtacgtggacggcgtggaggtgcataatgccaagacaaagccgtgtgaggagcagtacggcagcacgtaccgttgtgtcagcgtcctcaccgtcctgcaccaggactggctgaatggcaaggagtacaagtgcaaggtctccaacaaagccctcccagcccccatcgagaaaaccatctccaaagccaaagggcagccccgagaaccacaggtgtacaccctgcccccatcccgggaggagatgaccaagaaccaggtcagcctgacctgcctggtcaaaggcttctatcccagcgacatcgccgtggagtgggagagcaatgggcagccggagaacaactacaagaccacgcctcccgtgctggactccgacggctccttcttcctctatagcaagctcaccgtggacaagagcaggtggcagcaggggaacgtcttctcatgctccgtgatgcatgaggctctgcacaaccactacacgcagaagagcctctccctgtctccgggtaaa

SEQ ID NO: 2109 - DNA, 1350 bp, synthetic construct
  misc_feature 1..1350: note = source = /note="Description of Artificial Sequence: Synthetic polynucleotide"
  source 1..1350: mol_type = other DNA
caggtgcagctggtggagtctgggggaggcgtggtccagcctgggaggtccctgagactctcctgtgcagcgtctggattcagtttcagtagctatggcatgcactgggtccgccaggctccaggcaagggactggagtgggtggcagttatatggtatgatggaagtaataaatactatgaagactccgtgaagggccgattcaccatctccagagacaattccaagaacacgctgtttctgcaagtgaacagcctgagagccgaggacacggctgtgtattactgtgcgagagggattacgatttttggtcatgggtttgaatattggggccagggaaccctggtcaccgtctcctcagcctccaccaagggcccatcggtcttccccctggcaccctcctccaagagcacctctgggggcacagcggccctgggctgcctggtcaaggactacttccccgaaccggtgacggtgtcgtggaactcaggcgccctgaccagcggcgtgcacaccttcccggctgtcctacagtcctcaggactctactccctcagcagcgtggtgaccgtgccctccagcagcttgggcacccagacctacatctgcaacgtgaatcacaagcccagcaacaccaaggtggacaagaaagttgagcccaaatcttgtgacaaaactcacacatgcccaccgtgcccagcacctgaactcctggggggaccgtcagtcttcctcttccccccaaaacccaaggacaccctcatgatctcccggacccctgaggtcacatgcgtggtggtggacgtgagccacgaagaccctgaggtcaagttcaactggtacgtggacggcgtggaggtgcataatgccaagacaaagccgtgtgaggagcagtacggcagcacgtaccgttgtgtcagcgtcctcaccgtcctgcaccaggactggctgaatggcaaggagtacaagtgcaaggtctccaacaaagccctcccagcccccatcgagaaaaccatctccaaagccaaagggcagccccgagaaccacaggtgtacaccctgcccccatcccgggaggagatgaccaagaaccaggtcagcctgacctgcctggtcaaaggcttctatcccagcgacatcgccgtggagtgggagagcaatgggcagccggagaacaactacaagaccacgcctcccgtgctggactccgacggctccttcttcctctatagcaagctcaccgtggacaagagcaggtggcagcaggggaacgtcttctcatgctccgtgatgcatgaggctctgcacaaccactacacgcagaagagcctctccctgtctccgggtaaa

SEQ ID NO: 2110 - DNA, 1350 bp, synthetic construct
  misc_feature 1..1350: note = source = /note="Description of Artificial Sequence: Synthetic polynucleotide"
  source 1..1350: mol_type = other DNA
caggtgcagctggtggagtctgggggaggcgtggtccagcctgggaggtccctgagactctcctgtgcagcgtctggattcagtttcagtagctatggcatgcactgggtccgccaggctccaggcaagggactggagtgggtggcagttatatggtatgatggaagtaataaatactatgaagacgccgtgaagggccgattcaccatctccagagacaattccaagaacacgctgtttctgcaagtgaacagcctgagagccgaggacacggctgtgtattactgtgcgagagggattacgatttttggtcatgggtttgaatattggggccagggaaccctggtcaccgtctcctcagcctccaccaagggcccatcggtcttccccctggcaccctcctccaagagcacctctgggggcacagcggccctgggctgcctggtcaaggactacttccccgaaccggtgacggtgtcgtggaactcaggcgccctgaccagcggcgtgcacaccttcccggctgtcctacagtcctcaggactctactccctcagcagcgtggtgaccgtgccctccagcagcttgggcacccagacctacatctgcaacgtgaatcacaagcccagcaacaccaaggtggacaagaaagttgagcccaaatcttgtgacaaaactcacacatgcccaccgtgcccagcacctgaactcctggggggaccgtcagtcttcctcttccccccaaaacccaaggacaccctcatgatctcccggacccctgaggtcacatgcgtggtggtggacgtgagccacgaagaccctgaggtcaagttcaactggtacgtggacggcgtggaggtgcataatgccaagacaaagccgtgtgaggagcagtacggcagcacgtaccgttgtgtcagcgtcctcaccgtcctgcaccaggactggctgaatggcaaggagtacaagtgcaaggtctccaacaaagccctcccagcccccatcgagaaaaccatctccaaagccaaagggcagccccgagaaccacaggtgtacaccctgcccccatcccgggaggagatgaccaagaaccaggtcagcctgacctgcctggtcaaaggcttctatcccagcgacatcgccgtggagtgggagagcaatgggcagccggagaacaactacaagaccacgcctcccgtgctggactccgacggctccttcttcctctatagcaagctcaccgtggacaagagcaggtggcagcaggggaacgtcttctcatgctccgtgatgcatgaggctctgcacaaccactacacgcagaagagcctctccctgtctccgggtaaa

SEQ ID NO: 2111 - DNA, 1350 bp, synthetic construct
  misc_feature 1..1350: note = source = /note="Description of Artificial Sequence: Synthetic polynucleotide"
  source 1..1350: mol_type = other DNA
caggtgcagctggtggagtctgggggaggcgtggtccagcctgggaggtccctgagactctcctgtgcagcgtctggattcagtttcagtagctatggcatgcactgggtccgccaggctccaggcaagggactggagtgggtggcagttatatggtatgatgcaagtaataaatactatgaagactccgtgaagggccgattcaccatctccagagacaattccaagaacacgctgtttctgcaagtgaacagcctgagagccgaggacacggctgtgtattactgtgcgagagggattacgatttttggtcatgggtttgaatattggggccagggaaccctggtcaccgtctcctcagcctccaccaagggcccatcggtcttccccctggcaccctcctccaagagcacctctgggggcacagcggccctgggctgcctggtcaaggactacttccccgaaccggtgacggtgtcgtggaactcaggcgccctgaccagcggcgtgcacaccttcccggctgtcctacagtcctcaggactctactccctcagcagcgtggtgaccgtgccctccagcagcttgggcacccagacctacatctgcaacgtgaatcacaagcccagcaacaccaaggtggacaagaaagttgagcccaaatcttgtgacaaaactcacacatgcccaccgtgcccagcacctgaactcctggggggaccgtcagtcttcctcttccccccaaaacccaaggacaccctcatgatctcccggacccctgaggtcacatgcgtggtggtggacgtgagccacgaagaccctgaggtcaagttcaactggtacgtggacggcgtggaggtgcataatgccaagacaaagccgtgtgaggagcagtacggcagcacgtaccgttgtgtcagcgtcctcaccgtcctgcaccaggactggctgaatggcaaggagtacaagtgcaaggtctccaacaaagccctcccagcccccatcgagaaaaccatctccaaagccaaagggcagccccgagaaccacaggtgtacaccctgcccccatcccgggaggagatgaccaagaaccaggtcagcctgacctgcctggtcaaaggcttctatcccagcgacatcgccgtggagtgggagagcaatgggcagccggagaacaactacaagaccacgcctcccgtgctggactccgacggctccttcttcctctatagcaagctcaccgtggacaagagcaggtggcagcaggggaacgtcttctcatgctccgtgatgcatgaggctctgcacaaccactacacgcagaagagcctctccctgtctccgggtaaa

SEQ ID NO: 2112 - DNA, 1350 bp, synthetic construct
  misc_feature 1..1350: note = source = /note="Description of Artificial Sequence: Synthetic polynucleotide"
  source 1..1350: mol_type = other DNA
caggtgcagctggtggagtctgggggaggcgtggtccagcctgggaggtccctgagactctcctgtgcagcatctggattcaccttcagtaactatggcatgcactgggtccgccaggctccaggcgaggggctggagtgggtggcagctatatggtttgatgcaagtgataaatactatgcagacgccgtgaagggccgattcaccatctccagagacaactccaagaacacgctgtatctgcaaatgaacagcctgagagccgaggacacggctgtgtattactgtgcgagagatcaggcgatttttggagtggtccccgactactggggccagggaaccctggtcaccgtctcctcagcctccaccaagggcccatcggtcttccccctggcaccctcctccaagagcacctctgggggcacagcggccctgggctgcctggtcaaggactacttccccgaaccggtgacggtgtcgtggaactcaggcgccctgaccagcggcgtgcacaccttcccggctgtcctacagtcctcaggactctactccctcagcagcgtggtgaccgtgccctccagcagcttgggcacccagacctacatctgcaacgtgaatcacaagcccagcaacaccaaggtggacaagaaagttgagcccaaatcttgtgacaaaactcacacatgcccaccgtgcccagcacctgaactcctggggggaccgtcagtcttcctcttccccccaaaacccaaggacaccctcatgatctcccggacccctgaggtcacatgcgtggtggtggacgtgagccacgaagaccctgaggtcaagttcaactggtacgtggacggcgtggaggtgcataatgccaagacaaagccgtgtgaggagcagtacggcagcacgtaccgttgtgtcagcgtcctcaccgtcctgcaccaggactggctgaatggcaaggagtacaagtgcaaggtctccaacaaagccctcccagcccccatcgagaaaaccatctccaaagccaaagggcagccccgagaaccacaggtgtacaccctgcccccatcccgggaggagatgaccaagaaccaggtcagcctgacctgcctggtcaaaggcttctatcccagcgacatcgccgtggagtgggagagcaatgggcagccggagaacaactacaagaccacgcctcccgtgctggactccgacggctccttcttcctctatagcaagctcaccgtggacaagagcaggtggcagcaggggaacgtcttctcatgctccgtgatgcatgaggctctgcacaaccactacacgcagaagagcctctccctgtctccgggtaaa

SEQ ID NO: 2113 - DNA, 1350 bp, synthetic construct
  misc_feature 1..1350: note = source = /note="Description of Artificial Sequence: Synthetic polynucleotide"
  source 1..1350: mol_type = other DNA
caggtgcagctggtggagtctgggggaggcgtggtccagcctgggaggtccctgagactctcctgtgcagcatctggattcaccttcagtaactatggcatgcactgggtccgccaggctccaggcgaggggctggagtgggtggcagctatatggtttgatgcaagtgataaatactatgcagactccgtgaagggccgattcaccatctccagagacaactccaagaacacgctgtatctgcaaatgaacagcctgagagccgaggacacggctgtgtattactgtgcgagagatcaggcgatttttggagtggtccccgactactggggccagggaaccctggtcaccgtctcctcagcctccaccaagggcccatcggtcttccccctggcaccctcctccaagagcacctctgggggcacagcggccctgggctgcctggtcaaggactacttccccgaaccggtgacggtgtcgtggaactcaggcgccctgaccagcggcgtgcacaccttcccggctgtcctacagtcctcaggactctactccctcagcagcgtggtgaccgtgccctccagcagcttgggcacccagacctacatctgcaacgtgaatcacaagcccagcaacaccaaggtggacaagaaagttgagcccaaatcttgtgacaaaactcacacatgcccaccgtgcccagcacctgaactcctggggggaccgtcagtcttcctcttccccccaaaacccaaggacaccctcatgatctcccggacccctgaggtcacatgcgtggtggtggacgtgagccacgaagaccctgaggtcaagttcaactggtacgtggacggcgtggaggtgcataatgccaagacaaagccgtgtgaggagcagtacggcagcacgtaccgttgtgtcagcgtcctcaccgtcctgcaccaggactggctgaatggcaaggagtacaagtgcaaggtctccaacaaagccctcccagcccccatcgagaaaaccatctccaaagccaaagggcagccccgagaaccacaggtgtacaccctgcccccatcccgggaggagatgaccaagaaccaggtcagcctgacctgcctggtcaaaggcttctatcccagcgacatcgccgtggagtgggagagcaatgggcagccggagaacaactacaagaccacgcctcccgtgctggactccgacggctccttcttcctctatagcaagctcaccgtggacaagagcaggtggcagcaggggaacgtcttctcatgctccgtgatgcatgaggctctgcacaaccactacacgcagaagagcctctccctgtctccgggtaaa

SEQ ID NO: 2114 - DNA, 1350 bp, synthetic construct
  misc_feature 1..1350: note = source = /note="Description of Artificial Sequence: Synthetic polynucleotide"
  source 1..1350: mol_type = other DNA
caggtgcagctggtggagtctgggggaggcgtggtccagcctgggaggtccctgagactctcctgtgcagcatctggattcaccttcagtaactatggcatgcactgggtccgccaggctccaggcgaggggctggagtgggtggcagctatatggtttgatggaagtgataaatactatgcagacgccgtgaagggccgattcaccatctccagagacaactccaagaacacgctgtatctgcaaatgaacagcctgagagccgaggacacggctgtgtattactgtgcgagagatcaggcgatttttggagtggtccccgactactggggccagggaaccctggtcaccgtctcctcagcctccaccaagggcccatcggtcttccccctggcaccctcctccaagagcacctctgggggcacagcggccctgggctgcctggtcaaggactacttccccgaaccggtgacggtgtcgtggaactcaggcgccctgaccagcggcgtgcacaccttcccggctgtcctacagtcctcaggactctactccctcagcagcgtggtgaccgtgccctccagcagcttgggcacccagacctacatctgcaacgtgaatcacaagcccagcaacaccaaggtggacaagaaagttgagcccaaatcttgtgacaaaactcacacatgcccaccgtgcccagcacctgaactcctggggggaccgtcagtcttcctcttccccccaaaacccaaggacaccctcatgatctcccggacccctgaggtcacatgcgtggtggtggacgtgagccacgaagaccctgaggtcaagttcaactggtacgtggacggcgtggaggtgcataatgccaagacaaagccgtgtgaggagcagtacggcagcacgtaccgttgtgtcagcgtcctcaccgtcctgcaccaggactggctgaatggcaaggagtacaagtgcaaggtctccaacaaagccctcccagcccccatcgagaaaaccatctccaaagccaaagggcagccccgagaaccacaggtgtacaccctgcccccatcccgggaggagatgaccaagaaccaggtcagcctgacctgcctggtcaaaggcttctatcccagcgacatcgccgtggagtgggagagcaatgggcagccggagaacaactacaagaccacgcctcccgtgctggactccgacggctccttcttcctctatagcaagctcaccgtggacaagagcaggtggcagcaggggaacgtcttctcatgctccgtgatgcatgaggctctgcacaaccactacacgcagaagagcctctccctgtctccgggtaaa

SEQ ID NO: 2115 - DNA, 1350 bp, synthetic construct; identical to SEQ ID NO: 2112
  misc_feature 1..1350: note = source = /note="Description of Artificial Sequence: Synthetic polynucleotide"
  source 1..1350: mol_type = other DNA

SEQ ID NO: 2116 - DNA, 1350 bp, synthetic construct
  misc_feature 1..1350: note = source = /note="Description of Artificial Sequence: Synthetic polynucleotide"
  source 1..1350: mol_type = other DNA
caggtgcagctggtggagtctgggggaggcgtggtccagcctgggaggtccctgagactctcctgtgcagcatctggattcaccttcagtaactatggcatgcactgggtccgccaggctccaggcaaggggctggagtgggtggcagctatatggtttgatgcaagtgataaatactatgcagacgccgtgaagggccgattcaccatctccagagacaactccaagaacacgctgtatctgcaaatgaacagcctgagagccgaggacacggctgtgtattactgtgcgagagatcaggcgatttttggagtggtccccgactactggggccagggaaccctggtcaccgtctcctcagcctccaccaagggcccatcggtcttccccctggcaccctcctccaagagcacctctgggggcacagcggccctgggctgcctggtcaaggactacttccccgaaccggtgacggtgtcgtggaactcaggcgccctgaccagcggcgtgcacaccttcccggctgtcctacagtcctcaggactctactccctcagcagcgtggtgaccgtgccctccagcagcttgggcacccagacctacatctgcaacgtgaatcacaagcccagcaacaccaaggtggacaagaaagttgagcccaaatcttgtgacaaaactcacacatgcccaccgtgcccagcacctgaactcctggggggaccgtcagtcttcctcttccccccaaaacccaaggacaccctcatgatctcccggacccctgaggtcacatgcgtggtggtggacgtgagccacgaagaccctgaggtcaagttcaactggtacgtggacggcgtggaggtgcataatgccaagacaaagccgtgtgaggagcagtacggcagcacgtaccgttgtgtcagcgtcctcaccgtcctgcaccaggactggctgaatggcaaggagtacaagtgcaaggtctccaacaaagccctcccagcccccatcgagaaaaccatctccaaagccaaagggcagccccgagaaccacaggtgtacaccctgcccccatcccgggaggagatgaccaagaaccaggtcagcctgacctgcctggtcaaaggcttctatcccagcgacatcgccgtggagtgggagagcaatgggcagccggagaacaactacaagaccacgcctcccgtgctggactccgacggctccttcttcctctatagcaagctcaccgtggacaagagcaggtggcagcaggggaacgtcttctcatgctccgtgatgcatgaggctctgcacaaccactacacgcagaagagcctctccctgtctccgggtaaa

SEQ ID NO: 2117 - DNA, 1350 bp, synthetic construct; identical to SEQ ID NO: 2116
  misc_feature 1..1350: note = source = /note="Description of Artificial Sequence: Synthetic polynucleotide"
  source 1..1350: mol_type = other DNA

SEQ ID NO: 2118 - DNA, 1350 bp, synthetic construct; identical to SEQ ID NO: 2112
  misc_feature 1..1350: note = source = /note="Description of Artificial Sequence: Synthetic polynucleotide"
  source 1..1350: mol_type = other DNA

SEQ ID NO: 2119 - DNA, 1350 bp, synthetic construct; identical to SEQ ID NO: 2116
  misc_feature 1..1350: note = source = /note="Description of Artificial Sequence: Synthetic polynucleotide"
  source 1..1350: mol_type = other DNA

SEQ ID NO: 2120 - DNA, 1368 bp, synthetic construct
  misc_feature 1..1368: note = source = /note="Description of Artificial Sequence: Synthetic polynucleotide"
  source 1..1368: mol_type = other DNA
caggtgcagttgcaggagtcgggcccaggactggtgaagccttcagagaccctgtccctcacctgcactgtctctggtgactccatcagcagtggtggttactactggagctggatccgccagcccccagggaagggcctggagtggattgggtacatctattacagtgggagcacctactacaacccgtccctcaagagtcgagttaccatatcagtagacacgtctaagaaccagttctccctgaagctgagctctgtgactgccgcggacacggccgtgtattactgtgcgagagatcgtattacgatttttggagtggttatggggggcggtatggacgtctggggccaagggaccacggtcaccgtctcctcagcctccaccaagggcccatcggtcttccccctggcaccctcctccaagagcacctctgggggcacagcggccctgggctgcctggtcaaggactacttccccgaaccggtgacggtgtcgtggaactcaggcgccctgaccagcggcgtgcacaccttcccggctgtcctacagtcctcaggactctactccctcagcagcgtggtgaccgtgccctccagcagcttgggcacccagacctacatctgcaacgtgaatcacaagcccagcaacaccaaggtggacaagaaagttgagcccaaatcttgtgacaaaactcacacatgcccaccgtgcccagcacctgaactcctggggggaccgtcagtcttcctcttccccccaaaacccaaggacaccctcatgatctcccggacccctgaggtcacatgcgtggtggtggacgtgagccacgaagaccctgaggtcaagttcaactggtacgtggacggcgtggaggtgcataatgccaagacaaagccgtgtgaggagcagtacggcagcacgtaccgttgtgtcagcgtcctcaccgtcctgcaccaggactggctgaatggcaaggagtacaagtgcaaggtctccaacaaagccctcccagcccccatcgagaaaaccatctccaaagccaaagggcagccccgagaaccacaggtgtacaccctgcccccatcccgggaggagatgaccaagaaccaggtcagcctgacctgcctggtcaaaggcttctatcccagcgacatcgccgtggagtgggagagcaatgggcagccggagaacaactacaagaccacgcctcccgtgctggactccgacggctccttcttcctctatagcaagctcaccgtggacaagagcaggtggcagcaggggaacgtcttctcatgctccgtgatgcatgaggctctgcacaaccactacacgcagaagagcctctccctgtctccgggtaaa

SEQ ID NO: 2121 - DNA, 1368 bp, synthetic construct; identical to SEQ ID NO: 2120
  misc_feature 1..1368: note = source = /note="Description of Artificial Sequence: Synthetic polynucleotide"
  source 1..1368: mol_type = other DNA

SEQ ID NO: 2122 - DNA, 1368 bp, synthetic construct
  misc_feature 1..1368: note = source = /note="Description of Artificial Sequence: Synthetic polynucleotide"
  source 1..1368: mol_type = other DNA
caggtgcagttgcaggagtcgggcccaggactggtgaagccttcacagaccctgtccctcacctgcactgtctctggtgactccatcagcagtggtggttactactggagctggatccgccagcccccagggaagggcctggagtggattgggtacatctattacagtgggagcacctactacaacccgtccctcaagagtcgagttaccatatcagtagacacgtctaagaaccagttctccctgaagctgagctctgtgactgccgcggacacggccgtgtattactgtgcgagagatcgtattacgatttttggagtggttatggggggcggtatggacgtctggggccaagggaccacggtcaccgtctcctcagcctccaccaagggcccatcggtcttccccctggcaccctcctccaagagcacctctgggggcacagcggccctgggctgcctggtcaaggactacttccccgaaccggtgacggtgtcgtggaactcaggcgccctgaccagcggcgtgcacaccttcccggctgtcctacagtcctcaggactctactccctcagcagcgtggtgaccgtgccctccagcagcttgggcacccagacctacatctgcaacgtgaatcacaagcccagcaacaccaaggtggacaagaaagttgagcccaaatcttgtgacaaaactcacacatgcccaccgtgcccagcacctgaactcctggggggaccgtcagtcttcctcttccccccaaaacccaaggacaccctcatgatctcccggacccctgaggtcacatgcgtggtggtggacgtgagccacgaagaccctgaggtcaagttcaactggtacgtggacggcgtggaggtgcataatgccaagacaaagccgtgtgaggagcagtacggcagcacgtaccgttgtgtcagcgtcctcaccgtcctgcaccaggactggctgaatggcaaggagtacaagtgcaaggtctccaacaaagccctcccagcccccatcgagaaaaccatctccaaagccaaagggcagccccgagaaccacaggtgtacaccctgcccccatcccgggaggagatgaccaagaaccaggtcagcctgacctgcctggtcaaaggcttctatcccagcgacatcgccgtggagtgggagagcaatgggcagccggagaacaactacaagaccacgcctcccgtgctggactccgacggctccttcttcctctatagcaagctcaccgtggacaagagcaggtggcagcaggggaacgtcttctcatgctccgtgatgcatgaggctctgcacaaccactacacgcagaagagcctctccctgtctccgggtaaa

SEQ ID NO: 2123 - DNA, 1368 bp, synthetic construct
  misc_feature 1..1368: note = source = /note="Description of Artificial Sequence: Synthetic polynucleotide"
  source 1..1368: mol_type = other DNA
caggtgcagttgcaggagtcgggcccaggactggtgaagccttcagagaccctgtccctcacctgcactgtctctggtgactccatcagcagtggtggttactactggagctggatccgccagcacccagggaagggcctggagtggattgggtacatctattacagtgggagcacctactacaacccgtccctcaagagtcgagttaccatatcagtagacacgtctaagaaccagttctccctgaagctgagctctgtgactgccgcggacacggccgtgtattactgtgcgagagatcgtattacgatttttggagtggttatggggggcggtatggacgtctggggccaagggaccacggtcaccgtctcctcagcctccaccaagggcccatcggtcttccccctggcaccctcctccaagagcacctctgggggcacagcggccctgggctgcctggtcaaggactacttccccgaaccggtgacggtgtcgtggaactcaggcgccctgaccagcggcgtgcacaccttcccggctgtcctacagtcctcaggactctactccctcagcagcgtggtgaccgtgccctccagcagcttgggcacccagacctacatctgcaacgtgaatcacaagcccagcaacaccaaggtggacaagaaagttgagcccaaatcttgtgacaaaactcacacatgcccaccgtgcccagcacctgaactcctggggggaccgtcagtcttcctcttccccccaaaacccaaggacaccctcatgatctcccggacccctgaggtcacatgcgtggtggtggacgtgagccacgaagaccctgaggtcaagttcaactggtacgtggacggcgtggaggtgcataatgccaagacaaagccgtgtgaggagcagtacggcagcacgtaccgttgtgtcagcgtcctcaccgtcctgcaccaggactggctgaatggcaaggagtacaagtgcaaggtctccaacaaagccctcccagcccccatcgagaaaaccatctccaaagccaaagggcagccccgagaaccacaggtgtacaccctgcccccatcccgggaggagatgaccaagaaccaggtcagcctgacctgcctggtcaaaggcttctatcccagcgacatcgccgtggagtgggagagcaatgggcagccggagaacaactacaagaccacgcctcccgtgctggactccgacggctccttcttcctctatagcaagctcaccgtggacaagagcaggtggcagcaggggaacgtcttctcatgctccgtgatgcatgaggctctgcacaaccactacacgcagaagagcctctccctgtctccgggtaaa

SEQ ID NO: 2124 - DNA, 1368 bp, synthetic construct; identical to SEQ ID NO: 2050
  misc_feature 1..1368: note = source = /note="Description of Artificial Sequence: Synthetic polynucleotide"
  source 1..1368: mol_type = other DNA

SEQ ID NO: 2125 - DNA, 1368 bp, synthetic construct; identical to SEQ ID NO: 2123
  misc_feature 1..1368: note = source = /note="Description of Artificial Sequence: Synthetic polynucleotide"
  source 1..1368: mol_type = other DNA

SEQ ID NO: 2126 - DNA, 1368 bp, synthetic construct; identical to SEQ ID NO: 2122
  misc_feature 1..1368: note = source = /note="Description of Artificial Sequence: Synthetic polynucleotide"
  source 1..1368: mol_type = other DNA

SEQ ID NO: 2127 - DNA, 1359 bp, synthetic construct
  misc_feature 1..1359: note = source = /note="Description of Artificial Sequence: Synthetic polynucleotide"
  source 1..1359: mol_type = other DNA
caggtgcagctggtgcagtctggggctgaggtgaagaagcctggggcctcagtgaaggtctcctgcaaggcttctggatacaccttcaccggctactatatccactgggtgcgacaggcccctggacaagggcttgagtggatggggtggatcaaccctgaaagtggtggcacagactattcacagaggtttcagggcagggtcaccatgaccagggacacgtccatcagcacagcctacatggaactgaacaggctgagatctgacgacacggccgtgtattactgtgcgagagaggccacgatttttggaatggttattgtaccgtttgactactggggccagggaaccctggtcaccgtctcctcagcctccaccaagggcccatcggtcttccccctggcaccctcctccaagagcacctctgggggcacagcggccctgggctgcctggtcaaggactacttccccgaaccggtgacggtgtcgtggaactcaggcgccctgaccagcggcgtgcacaccttcccggctgtcctacagtcctcaggactctactccctcagcagcgtggtgaccgtgccctccagcagcttgggcacccagacctacatctgcaacgtgaatcacaagcccagcaacaccaaggtggacaagaaagttgagcccaaatcttgtgacaaaactcacacatgcccaccgtgcccagcacctgaactcctggggggaccgtcagtcttcctcttccccccaaaacccaaggacaccctcatgatctcccggacccctgaggtcacatgcgtggtggtggacgtgagccacgaagaccctgaggtcaagttcaactggtacgtggacggcgtggaggtgcataatgccaagacaaagccgtgtgaggagcagtacggcagcacgtaccgttgtgtcagcgtcctcaccgtcctgcaccaggactggctgaatggcaaggagtacaagtgcaaggtctccaacaaagccctcccagcccccatcgagaaaaccatctccaaagccaaagggcagccccgagaaccacaggtgtacaccctgcccccatcccgggaggagatgaccaagaaccaggtcagcctgacctgcctggtcaaaggcttctatcccagcgacatcgccgtggagtgggagagcaatgggcagccggagaacaactacaagaccacgcctcccgtgctggactccgacggctccttcttcctctatagcaagctcaccgtggacaagagcaggtggcagcaggggaacgtcttctcatgctccgtgatgcatgaggctctgcacaaccactacacgcagaagagcctctccctgtctccgggtaaa

SEQ ID NO: 2128 - DNA, 1359 bp, synthetic construct
  misc_feature 1..1359: note = source = /note="Description of Artificial Sequence: Synthetic polynucleotide"
  source 1..1359: mol_type = other DNA
caggtgccgctggtgcagtctggggctgaggtgaagaagcctggggcctcagtgaaggtctcctgcaaggcttctggatacaccttcaccggctactatatccactgggtgcgacaggcccctggacaagggcttgagtggatggggtggatcaaccctgaaagtggtggcacagactattcacagaggtttcagggcaggttcaccatgaccagggacacgtccatcagcacagcctacatggaactgaacaggctgagatctgacgacacggccgtgtattactgtgcgagagaggccacgatttttggaatggttattgtaccgtttgactactggggccagggaaccctggtcaccgtctcctcagcctccaccaagggcccatcggtcttccccctggcaccctcctccaagagcacctctgggggcacagcggccctgggctgcctggtcaaggactacttccccgaaccggtgacggtgtcgtggaactcaggcgccctgaccagcggcgtgcacaccttcccggctgtcctacagtcctcaggactctactccctcagcagcgtggtgaccgtgccctccagcagcttgggcacccagacctacatctgcaacgtgaatcacaagcccagcaacaccaaggtggacaagaaagttgagcccaaatcttgtgacaaaactcacacatgcccaccgtgcccagcacctgaactcctggggggaccgtcagtcttcctcttccccccaaaacccaaggacaccctcatgatctcccggacccctgaggtcacatgcgtggtggtggacgtgagccacgaagaccctgaggtcaagttcaactggtacgtggacggcgtggaggtgcataatgccaagacaaagccgtgtgaggagcagtacggcagcacgtaccgttgtgtcagcgtcctcaccgtcctgcaccaggactggctgaatggcaaggagtacaagtgcaaggtctccaacaaagccctcccagcccccatcgagaaaaccatctccaaagccaaagggcagccccgagaaccacaggtgtacaccctgcccccatcccgggaggagatgaccaagaaccaggtcagcctgacctgcctggtcaaaggcttctatcccagcgacatcgccgtggagtgggagagcaatgggcagccggagaacaactacaagaccacgcctcccgtgctggactccgacggctccttcttcctctatagcaagctcaccgtggacaagagcaggtggcagcaggggaacgtcttctcatgctccgtgatgcatgaggctctgcacaaccactacacgcagaagagcctctccctgtctccgggtaaa

SEQ ID NO: 2129 - DNA, 1359 bp, synthetic construct
  misc_feature 1..1359: note = source = /note="Description of Artificial Sequence: Synthetic polynucleotide"
  source 1..1359: mol_type = other DNA
caggtgcagctggtgcagtctggggctgaggtgaagaagcctggggcctcagtgaaggtctcctgcaaggcttctggatacaccttcaccggctactatatccactgggtgcgacaggcccctggacaagggcttgagtggatggggtggatcaaccctgacgctggtggcacagactattcacagaggtttcagggcagggtcaccatgaccagggacacgtccatcagcacagcctacatggaactgaacaggctgagatctgacgacacggccgtgtattactgtgcgagagaggccacgatttttggaatggttattgtaccgtttgactactggggccagggaaccctggtcaccgtctcctcagcctccaccaagggcccatcggtcttccccctggcaccctcctccaagagcacctctgggggcacagcggccctgggctgcctggtcaaggactacttccccgaaccggtgacggtgtcgtggaactcaggcgccctgaccagcggcgtgcacaccttcccggctgtcctacagtcctcaggactctactccctcagcagcgtggtgaccgtgccctccagcagcttgggcacccagacctacatctgcaacgtgaatcacaagcccagcaacaccaaggtggacaagaaagttgagcccaaatcttgtgacaaaactcacacatgcccaccgtgcccagcacctgaactcctggggggaccgtcagtcttcctcttccccccaaaacccaaggacaccctcatgatctcccggacccctgaggtcacatgcgtggtggtggacgtgagccacgaagaccctgaggtcaagttcaactggtacgtggacggcgtggaggtgcataatgccaagacaaagccgtgtgaggagcagtacggcagcacgtaccgttgtgtcagcgtcctcaccgtcctgcaccaggactggctgaatggcaaggagtacaagtgcaaggtctccaacaaagccctcccagcccccatcgagaaaaccatctccaaagccaaagggcagccccgagaaccacaggtgtacaccctgcccccatcccgggaggagatgaccaagaaccaggtcagcctgacctgcctggtcaaaggcttctatcccagcgacatcgccgtggagtgggagagcaatgggcagccggagaacaactacaagaccacgcctcccgtgctggactccgacggctccttcttcctctatagcaagctcaccgtggacaagagcaggtggcagcaggggaacgtcttctcatgctccgtgatgcatgaggctctgcacaaccactacacgcagaagagcctctccctgtctccgggtaaa

SEQ ID NO: 2130 - DNA, 1359 bp, synthetic construct
  misc_feature 1..1359: note = source = /note="Description of Artificial Sequence: Synthetic polynucleotide"
  source 1..1359: mol_type = other DNA
caggtgccgctggtgcagtctggggctgaggtgaagaagcctggggcctcagtgaaggtctcctgcaaggcttctggatacaccttcaccggctactatatccactgggtgcgacaggcccctggacaagggcttgagtggatggggtggatcaaccctgacgctggtggcacagactattcacagaggtttcagggcaggttcaccatgaccagggacacgtccatcagcacagcctacatggaactgaacaggctgagatctgacgacacggccgtgtattactgtgcgagagaggccacgatttttggaatggttattgtaccgtttgactactggggccagggaaccctggtcaccgtctcctcagcctccaccaagggcccatcggtcttccccctggcaccctcctccaagagcacctctgggggcacagcggccctgggctgcctggtcaaggactacttccccgaaccggtgacggtgtcgtggaactcaggcgccctgaccagcggcgtgcacaccttcccggctgtcctacagtcctcaggactctactccctcagcagcgtggtgaccgtgccctccagcagcttgggcacccagacctacatctgcaacgtgaatcacaagcccagcaacaccaaggtggacaagaaagttgagcccaaatcttgtgacaaaactcacacatgcccaccgtgcccagcacctgaactcctggggggaccgtcagtcttcctcttccccccaaaacccaaggacaccctcatgatctcccggacccctgaggtcacatgcgtggtggtggacgtgagccacgaagaccctgaggtcaagttcaactggtacgtggacggcgtggaggtgcataatgccaagacaaagccgtgtgaggagcagtacggcagcacgtaccgttgtgtcagcgtcctcaccgtcctgcaccaggactggctgaatggcaaggagtacaagtgcaaggtctccaacaaagccctcccagcccccatcgagaaaaccatctccaaagccaaagggcagccccgagaaccacaggtgtacaccctgcccccatcccgggaggagatgaccaagaaccaggtcagcctgacctgcctggtcaaaggcttctatcccagcgacatcgccgtggagtgggagagcaatgggcagccggagaacaactacaagaccacgcctcccgtgctggactccgacggctccttcttcctctatagcaagctcaccgtggacaagagcaggtggcagcaggggaacgtcttctcatgctccgtgatgcatgaggctctgcacaaccactacacgcagaagagcctctccctgtctccgggtaaa

SEQ ID NO: 2131 - DNA, 1359 bp, synthetic construct
  misc_feature 1..1359: note = source = /note="Description of Artificial Sequence: Synthetic polynucleotide"
  source 1..1359: mol_type = other DNA
caggtgcagctggtgcagtctggggctgaggtgaagaagcctggggcctcagtgaaggtctcctgcaaggcttctggatacaccttcaccggctactatatccactgggtgcgacaggcccctggacaagggcttgagtggatggggtggatcaaccctgacagtggtggcacagactattcacagaggtttcagggcagggtcaccatgaccagggacacgtccatcagcacagcctacatggaactgaacaggctgagatctgacgacacggccgtgtattactgtgcgagagaggccacgatttttggaatggttattgtaccgtttgactactggggccagggaaccctggtcaccgtctcctcagcctccaccaagggcccatcggtcttccccctggcaccctcctccaagagcacctctgggggcacagcggccctgggctgcctggtcaaggactacttccccgaaccggtgacggtgtcgtggaactcaggcgccctgaccagcggcgtgcacaccttcccggctgtcctacagtcctcaggactctactccctcagcagcgtggtgaccgtgccctccagcagcttgggcacccagacctacatctgcaacgtgaatcacaagcccagcaacaccaaggtggacaagaaagttgagcccaaatcttgtgacaaaactcacacatgcccaccgtgcccagcacctgaactcctggggggaccgtcagtcttcctcttccccccaaaacccaaggacaccctcatgatctcccggacccctgaggtcacatgcgtggtggtggacgtgagccacgaagaccctgaggtcaagttcaactggtacgtggacggcgtggaggtgcataatgccaagacaaagccgtgtgaggagcagtacggcagcacgtaccgttgtgtcagcgtcctcaccgtcctgcaccaggactggctgaatggcaaggagtacaagtgcaaggtctccaacaaagccctcccagcccccatcgagaaaaccatctccaaagccaaagggcagccccgagaaccacaggtgtacaccctgcccccatcccgggaggagatgaccaagaaccaggtcagcctgacctgcctggtcaaaggcttctatcccagcgacatcgccgtggagtgggagagcaatgggcagccggagaacaactacaagaccacgcctcccgtgctggactccgacggctccttcttcctctatagcaagctcaccgtggacaagagcaggtggcagcaggggaacgtcttctcatgctccgtgatgcatgaggctctgcacaaccactacacgcagaagagcctctccctgtctccgggtaaa

SEQ ID NO: 2132 - DNA, 1359 bp, synthetic construct
  misc_feature 1..1359: note = source = /note="Description of Artificial Sequence: Synthetic polynucleotide"
  source 1..1359: mol_type = other DNA
caggtgcagctggtgcagtctggggctgaggtgaagaagcctggggcctcagtgaaggtctcctgcaaggcttctggatacaccttcaccggctactatatccactgggtgcgacaggcccctggacaagggcttgagtggatggggtggatcaaccctgacagtggtggcacagactattcacagaggtttcagggcaggttcaccatgaccagggacacgtccatcagcacagcctacatggaactgaacaggctgagatctgacgacacggccgtgtattactgtgcgagagaggccacgatttttggaatggttattgtaccgtttgactactggggccagggaaccctggtcaccgtctcctcagcctccaccaagggcccatcggtcttccccctggcaccctcctccaagagcacctctgggggcacagcggccctgggctgcctggtcaaggactacttccccgaaccggtgacggtgtcgtggaactcaggcgccctgaccagcggcgtgcacaccttcccggctgtcctacagtcctcaggactctactccctcagcagcgtggtgaccgtgccctccagcagcttgggcacccagacctacatctgcaacgtgaatcacaagcccagcaacaccaaggtggacaagaaagttgagcccaaatcttgtgacaaaactcacacatgcccaccgtgcccagcacctgaactcctggggggaccgtcagtcttcctcttccccccaaaacccaaggacaccctcatgatctcccggacccctgaggtcacatgcgtggtggtggacgtgagccacgaagaccctgaggtcaagttcaactggtacgtggacggcgtggaggtgcataatgccaagacaaagccgtgtgaggagcagtacggcagcacgtaccgttgtgtcagcgtcctcaccgtcctgcaccaggactggctgaatggcaaggagtacaagtgcaaggtctccaacaaagccctcccagcccccatcgagaaaaccatctccaaagccaaagggcagccccgagaaccacaggtgtacaccctgcccccatcccgggaggagatgaccaagaaccaggtcagcctgacctgcctggtcaaaggcttctatcccagcgacatcgccgtggagtgggagagcaatgggcagccggagaacaactacaagaccacgcctcccgtgctggactccgacggctccttcttcctctatagcaagctcaccgtggacaagagcaggtggcagcaggggaacgtcttctcatgctccgtgatgcatgaggctctgcacaaccactacacgcagaagagcctctccctgtctccgggtaaa

SEQ ID NO: 2133 - DNA, 1359 bp, synthetic construct
  misc_feature 1..1359: note = source = /note="Description of Artificial Sequence: Synthetic polynucleotide"
  source 1..1359: mol_type = other DNA
caggtgccgctggtgcagtctggggctgaggtgaagaagcctggggcctcagtgaaggtctcctgcaaggcttctggatacaccttcaccggctactatatccactgggtgcgacaggcccctggacaagggcttgagtggatggggtggatcaaccctgacagtggtggcacagactattcacagaggtttcagggcagggtcaccatgaccagggacacgtccatcagcacagcctacatggaactgaacaggctgagatctgacgacacggccgtgtattactgtgcgagagaggccacgatttttggaatggttattgtaccgtttgactactggggccagggaaccctggtcaccgtctcctcagcctccaccaagggcccatcggtcttccccctggcaccctcctccaagagcacctctgggggcacagcggccctgggctgcctggtcaaggactacttccccgaaccggtgacggtgtcgtggaactcaggcgccctgaccagcggcgtgcacaccttcccggctgtcctacagtcctcaggactctactccctcagcagcgtggtgaccgtgccctccagcagcttgggcacccagacctacatctgcaacgtgaatcacaagcccagcaacaccaaggtggacaagaaagttgagcccaaatcttgtgacaaaactcacacatgcccaccgtgcccagcacctgaactcctggggggaccgtcagtcttcctcttccccccaaaacccaaggacaccctcatgatctcccggacccctgaggtcacatgcgtggtggtggacgtgagccacgaagaccctgaggtcaagttcaactggtacgtggacggcgtggaggtgcataatgccaagacaaagccgtgtgaggagcagtacggcagcacgtaccgttgtgtcagcgtcctcaccgtcctgcaccaggactggctgaatggcaaggagtacaagtgcaaggtctccaacaaagccctcccagcccccatcgagaaaaccatctccaaagccaaagggcagccccgagaaccacaggtgtacaccctgcccccatcccgggaggagatgaccaagaaccaggtcagcctgacctgcctggtcaaaggcttctatcccagcgacatcgccgtggagtgggagagcaatgggcagccggagaacaactacaagaccacgcctcccgtgctggactccgacggctccttcttcctctatagcaagctcaccgtggacaagagcaggtggcagcaggggaacgtcttctcatgctccgtgatgcatgaggctctgcacaaccactacacgcagaagagcctctccctgtctccgggtaaa

SEQ ID NO: 2134 - DNA, 1359 bp, synthetic construct
  misc_feature 1..1359: note = source = /note="Description of Artificial Sequence: Synthetic polynucleotide"
  source 1..1359: mol_type = other DNA
caggtgcagctggtgcagtctggggctgaggtgaagaagcctggggcctcagtgaaggtctcctgcaaggcttctggatacaccttcaccggctactatatccactgggtgcgacaggcccctggacaagggcttgagtggatggggtggatcaaccctgacgctggtggcacagactattcacagaggtttcagggcaggttcaccatgaccagggacacgtccatcagcacagcctacatggaactgaacaggctgagatctgacgacacggccgtgtattactgtgcgagagaggccacgatttttggaatggttattgtaccgtttgactactggggccagggaaccctggtcaccgtctcctcagcctccaccaagggcccatcggtcttccccctggcaccctcctccaagagcacctctgggggcacagcggccctgggctgcctggtcaaggactacttccccgaaccggtgacggtgtcgtggaactcaggcgccctgaccagcggcgtgcacaccttcccggctgtcctacagtcctcaggactctactccctcagcagcgtggtgaccgtgccctccagcagcttgggcacccagacctacatctgcaacgtgaatcacaagcccagcaacaccaaggtggacaagaaagttgagcccaaatcttgtgacaaaactcacacatgcccaccgtgcccagcacctgaactcctggggggaccgtcagtcttcctcttccccccaaaacccaaggacaccctcatgatctcccggacccctgaggtcacatgcgtggtggtggacgtgagccacgaagaccctgaggtcaagttcaactggtacgtggacggcgtggaggtgcataatgccaagacaaagccgtgtgaggagcagtacggcagcacgtaccgttgtgtcagcgtcctcaccgtcctgcaccaggactggctgaatggcaaggagtacaagtgcaaggtctccaacaaagccctcccagcccccatcgagaaaaccatctccaaagccaaagggcagccccgagaaccacaggtgtacaccctgcccccatcccgggaggagatgaccaagaaccaggtcagcctgacctgcctggtcaaaggcttctatcccagcgacatcgccgtggagtgggagagcaatgggcagccggagaacaactacaagaccacgcctcccgtgctggactccgacggctccttcttcctctatagcaagctcaccgtggacaagagcaggtggcagcaggggaacgtcttctcatgctccgtgatgcatgaggctctgcacaaccactacacgcagaagagcctctccctgtctccgggtaaa

SEQ ID NO: 2135 - DNA, 1359 bp, synthetic construct
  misc_feature 1..1359: note = source = /note="Description of Artificial Sequence: Synthetic polynucleotide"
  source 1..1359: mol_type = other DNA
caggtgccgctggtgcagtctggggctgaggtgaagaagcctggggcctcagtgaaggtctcctgcaaggcttctggatacaccttcaccggctactatatccactgggtgcgacaggcccctggacaagggcttgagtggatggggtggatcaaccctgacgctggtggcacagactattcacagaggtttcagggcagggtcaccatgaccagggacacgtccatcagcacagcctacatggaactgaacaggctgagatctgacgacacggccgtgtattactgtgcgagagaggccacgatttttggaatggttattgtaccgtttgactactggggccagggaaccctggtcaccgtctcctcagcctccaccaagggcccatcggtcttccccctggcaccctcctccaagagcacctctgggggcacagcggccctgggctgcctggtcaaggactacttccccgaaccggtgacggtgtcgtggaactcaggcgccctgaccagcggcgtgcacaccttcccggctgtcctacagtcctcaggactctactccctcagcagcgtggtgaccgtgccctccagcagcttgggcacccagacctacatctgcaacgtgaatcacaagcccagcaacaccaaggtggacaagaaagttgagcccaaatcttgtgacaaaactcacacatgcccaccgtgcccagcacctgaactcctggggggaccgtcagtcttcctcttccccccaaaacccaaggacaccctcatgatctcccggacccctgaggtcacatgcgtggtggtggacgtgagccacgaagaccctgaggtcaagttcaactggtacgtggacggcgtggaggtgcataatgccaagacaaagccgtgtgaggagcagtacggcagcacgtaccgttgtgtcagcgtcctcaccgtcctgcaccaggactggctgaatggcaaggagtacaagtgcaaggtctccaacaaagccctcccagcccccatcgagaaaaccatctccaaagccaaagggcagccccgagaaccacaggtgtacaccctgcccccatcccgggaggagatgaccaagaaccaggtcagcctgacctgcctggtcaaaggcttctatcccagcgacatcgccgtggagtgggagagcaatgggcagccggagaacaactacaagaccacgcctcccgtgctggactccgacggctccttcttcctctatagcaagctcaccgtggacaagagcaggtggcagcaggggaacgtcttctcatgctccgtgatgcatgaggctctgcacaaccactacacgcagaagagcctctccctgtctccgggtaaa

SEQ ID NO: 2136 - DNA, 1359 bp, synthetic construct
  misc_feature 1..1359: note = source = /note="Description of Artificial Sequence: Synthetic polynucleotide"
  source 1..1359: mol_type = other DNA
caggtgcagctggtgcagtctggggctgaggtgaagaagcctggggcctcagtgaaggtctcctgcaaggcttctggatacaccttcaccggctactatatccactgggtgcgacaggcccctggacaagggcttgagtggatggggtggatcaaccctgacgctggtggcacagactattcacagaggtttcagggcagggtcaccatgaccagggacacgtccatcagcacagcctacatggaactgaacagcctgagatctgacgacacggccgtgtattactgtgcgagagaggccacgatttttggaatggttattgtaccgtttgactactggggccagggaaccctggtcaccgtctcctcagcctccaccaagggcccatcggtcttccccctggcaccctcctccaagagcacctctgggggcacagcggccctgggctgcctggtcaaggactacttccccgaaccggtgacggtgtcgtggaactcaggcgccctgaccagcggcgtgcacaccttcccggctgtcctacagtcctcaggactctactccctcagcagcgtggtgaccgtgccctccagcagcttgggcacccagacctacatctgcaacgtgaatcacaagcccagcaacaccaaggtggacaagaaagttgagcccaaatcttgtgacaaaactcacacatgcccaccgtgcccagcacctgaactcctggggggaccgtcagtcttcctcttccccccaaaacccaaggacaccctcatgatctcccggacccctgaggtcacatgcgtggtggtggacgtgagccacgaagaccctgaggtcaagttcaactggtacgtggacggcgtggaggtgcataatgccaagacaaagccgtgtgaggagcagtacggcagcacgtaccgttgtgtcagcgtcctcaccgtcctgcaccaggactggctgaatggcaaggagtacaagtgcaaggtctccaacaaagccctcccagcccccatcgagaaaaccatctccaaagccaaagggcagccccgagaaccacaggtgtacaccctgcccccatcccgggaggagatgaccaagaaccaggtcagcctgacctgcctggtcaaaggcttctatcccagcgacatcgccgtggagtgggagagcaatgggcagccggagaacaactacaagaccacgcctcccgtgctggactccgacggctccttcttcctctatagcaagctcaccgtggacaagagcaggtggcagcaggggaacgtcttctcatgctccgtgatgcatgaggctctgcacaaccactacacgcagaagagcctctccctgtctccgggtaaa

SEQ ID NO: 2137 - DNA, 1359 bp, synthetic construct
  misc_feature 1..1359: note = source = /note="Description of Artificial Sequence: Synthetic polynucleotide"
  source 1..1359: mol_type = other DNA
caggtgcagctggtgcagtctggggctgaggtgaagaagcctggggcctcagtgaaggtctcctgcaaggcttctggatacaccttcaccggctactatatccactgggtgcgacaggcccctggacaagggcttgagtggatggggtggatcaaccctgaaagtggtggcacagactattcacagaggtttcagggcagggtcaccatgaccagggacacgtccatcagcacagcctacatggaactgaacagcctgagatctgacgacacggccgtgtattactgtgcgagagaggccacgatttttggaatggttattgtaccgtttgactactggggccagggaaccctggtcaccgtctcctcagcctccaccaagggcccatcggtcttccccctggcaccctcctccaagagcacctctgggggcacagcggccctgggctgcctggtcaaggactacttccccgaaccggtgacggtgtcgtggaactcaggcgccctgaccagcggcgtgcacaccttcccggctgtcctacagtcctcaggactctactccctcagcagcgtggtgaccgtgccctccagcagcttgggcacccagacctacatctgcaacgtgaatcacaagcccagcaacaccaaggtggacaagaaagttgagcccaaatcttgtgacaaaactcacacatgcccaccgtgcccagcacctgaactcctggggggaccgtcagtcttcctcttccccccaaaacccaaggacaccctcatgatctcccggacccctgaggtcacatgcgtggtggtggacgtgagccacgaagaccctgaggtcaagttcaactggtacgtggacggcgtggaggtgcataatgccaagacaaagccgtgtgaggagcagtacggcagcacgtaccgttgtgtcagcgtcctcaccgtcctgcaccaggactggctgaatggcaaggagtacaagtgcaaggtctccaacaaagccctcccagcccccatcgagaaaaccatctccaaagccaaagggcagccccgagaaccacaggtgtacaccctgcccccatcccgggaggagatgaccaagaaccaggtcagcctgacctgcctggtcaaaggcttctatcccagcgacatcgccgtggagtgggagagcaatgggcagccggagaacaactacaagaccacgcctcccgtgctggactccgacggctccttcttcctctatagcaagctcaccgtggacaagagcaggtggcagcaggggaacgtcttctcatgctccgtgatgcatgaggctctgcacaaccactacacgcagaagagcctctccctgtctccgggtaaa

SEQ ID NO: 2138 - DNA, 1359 bp, synthetic construct
  misc_feature 1..1359: note = source = /note="Description of Artificial Sequence: Synthetic polynucleotide"
  source 1..1359: mol_type = other DNA
caggtgccgctggtacagtctggggctgaggtgaagaagcctggggcctcagtgaaggtctcctgcaaggcttctggatacaccttcaccggctactatatacactgggtgcgtcaggcccctggacaagggcttgtgtggatggggtggatcagccctaacagtggtgaaacaagctatgcacagaagtttcaggacagggtcaccatgaccagggacacgtccatcagcacagcctatatggagctgagcagactgagatctgacgacacggccgtgtatttctgtgcgagagaggccacgatttttggaatgcttattgtaccatttgactactggggccagggaaccctggtcaccgtctcctcagcctccaccaagggcccatcggtcttccccctggcaccctcctccaagagcacctctgggggcacagcggccctgggctgcctggtcaaggactacttccccgaaccggtgacggtgtcgtggaactcaggcgccctgaccagcggcgtgcacaccttcccggctgtcctacagtcctcaggactctactccctcagcagcgtggtgaccgtgccctccagcagcttgggcacccagacctacatctgcaacgtgaatcacaagcccagcaacaccaaggtggacaagaaagttgagcccaaatcttgtgacaaaactcacacatgcccaccgtgcccagcacctgaactcctggggggaccgtcagtcttcctcttccccccaaaacccaaggacaccctcatgatctcccggacccctgaggtcacatgcgtggtggtggacgtgagccacgaagaccctgaggtcaagttcaactggtacgtggacggcgtggaggtgcataatgccaagacaaagccgtgtgaggagcagtacggcagcacgtaccgttgtgtcagcgtcctcaccgtcctgcaccaggactggctgaatggcaaggagtacaagtgcaaggtctccaacaaagccctcccagcccccatcgagaaaaccatctccaaagccaaagggcagccccgagaaccacaggtgtacaccctgcccccatcccgggaggagatgaccaagaaccaggtcagcctgacctgcctggtcaaaggcttctatcccagcgacatcgccgtggagtgggagagcaatgggcagccggagaacaactacaagaccacgcctcccgtgctggactccgacggctccttcttcctctatagcaagctcaccgtggacaagagcaggtggcagcaggggaacgtcttctcatgctccgtgatgcatgaggctctgcacaaccactacacgcagaagagcctctccctgtctccgggtaaa

SEQ ID NO: 2139 - DNA, 1359 bp, synthetic construct
  misc_feature 1..1359: note = source = /note="Description of Artificial Sequence: Synthetic polynucleotide"
  source 1..1359: mol_type = other DNA
caggtgccgctggtacagtctggggctgaggtgaagaagcctggggcctcagtgaaggtctcctgcaaggcttctggatacaccttcaccggctactatatacactgggtgcgtcaggcccctggacaagggcttgtgtggatggggtggatcagccctaacagtggtgacacaagctatgcacagaagtttcaggacagggtcaccatgaccagggacacgtccatcagcacagcctatatggagctgagcagactgagatctgacgacacggccgtgtatttctgtgcgagagaggccacgatttttggaatgcttattgtaccatttgactactggggccagggaaccctggtcaccgtctcctcagcctccaccaagggcccatcggtcttccccctggcaccctcctccaagagcacctctgggggcacagcggccctgggctgcctggtcaaggactacttccccgaaccggtgacggtgtcgtggaactcaggcgccctgaccagcggcgtgcacaccttcccggctgtcctacagtcctcaggactctactccctcagcagcgtggtgaccgtgccctccagcagcttgggcacccagacctacatctgcaacgtgaatcacaagcccagcaacaccaaggtggacaagaaagttgagcccaaatcttgtgacaaaactcacacatgcccaccgtgcccagcacctgaactcctggggggaccgtcagtcttcctcttccccccaaaacccaaggacaccctcatgatctcccggacccctgaggtcacatgcgtggtggtggacgtgagccacgaagaccctgaggtcaagttcaactggtacgtggacggcgtggaggtgcataatgccaagacaaagccgtgtgaggagcagtacggcagcacgtaccgttgtgtcagcgtcctcaccgtcctgcaccaggactggctgaatggcaaggagtacaagtgcaaggtctccaacaaagccctcccagcccccatcgagaaaaccatctccaaagccaaagggcagccccgagaaccacaggtgtacaccctgcccccatcccgggaggagatgaccaagaaccaggtcagcctgacctgcctggtcaaaggcttctatcccagcgacatcgccgtggagtgggagagcaatgggcagccggagaacaactacaagaccacgcctcccgtgctggactccgacggctccttcttcctctatagcaagctcaccgtggacaagagcaggtggcagcaggggaacgtcttctcatgctccgtgatgcatgaggctctgcacaaccactacacgcagaagagcctctccctgtctccgggtaaa

SEQ ID NO: 2140 - DNA, 1359 bp, synthetic construct; identical to SEQ ID NO: 2138
  misc_feature 1..1359: note = source = /note="Description of Artificial Sequence: Synthetic polynucleotide"
  source 1..1359: mol_type = other DNA

SEQ ID NO: 2141 - DNA, 1359 bp, synthetic construct
  misc_feature 1..1359: note = source = /note="Description of Artificial Sequence: Synthetic polynucleotide"
  source 1..1359: mol_type = other DNA
caggtgccgctggtacagtctggggctgaggtgaagaagcctggggcctcagtgaaggtctcctgcaaggcttctggatacaccttcaccggctactatatacactgggtgcgtcaggcccctggacaagggcttgtgtggatggggtggatcagccctaacagtggtgaaacaagctatgcacagaagtttcaggacagggtcaccatgaccagggacacgtccatcagcacagcctatatggagctgagcagactgagatctgacgacacggccgtgtatttctgtacgagagaggccacgatttttggaatgcttattgtaccatttgactactggggccagggaaccctggtcaccgtctcctcagcctccaccaagggcccatcggtcttccccctggcaccctcctccaagagcacctctgggggcacagcggccctgggctgcctggtcaaggactacttccccgaaccggtgacggtgtcgtggaactcaggcgccctgaccagcggcgtgcacaccttcccggctgtcctacagtcctcaggactctactccctcagcagcgtggtgaccgtgccctccagcagcttgggcacccagacctacatctgcaacgtgaatcacaagcccagcaacaccaaggtggacaagaaagttgagcccaaatcttgtgacaaaactcacacatgcccaccgtgcccagcacctgaactcctggggggaccgtcagtcttcctcttccccccaaaacccaaggacaccctcatgatctcccggacccctgaggtcacatgcgtggtggtggacgtgagccacgaagaccctgaggtcaagttcaactggtacgtggacggcgtggaggtgcataatgccaagacaaagccgtgtgaggagcagtacggcagcacgtaccgttgtgtcagcgtcctcaccgtcctgcaccaggactggctgaatggcaaggagtacaagtgcaaggtctccaacaaagccctcccagcccccatcgagaaaaccatctccaaagccaaagggcagccccgagaaccacaggtgtacaccctgcccccatcccgggaggagatgaccaagaaccaggtcagcctgacctgcctggtcaaaggcttctatcccagcgacatcgccgtggagtgggagagcaatgggcagccggagaacaactacaagaccacgcctcccgtgctggactccgacggctccttcttcctctatagcaagctcaccgtggacaagagcaggtggcagcaggggaacgtcttctcatgctccgtgatgcatgaggctctgcacaaccactacacgcagaagagcctctccctgtctccgggtaaa

SEQ ID NO: 2142 - DNA, 1359 bp, synthetic construct; identical to SEQ ID NO: 2048
  misc_feature 1..1359: note = source = /note="Description of Artificial Sequence: Synthetic polynucleotide"
  source 1..1359: mol_type = other DNA

SEQ ID NO: 2143 - DNA, 1359 bp, synthetic construct; identical to SEQ ID NO: 2141
  misc_feature 1..1359: note = source = /note="Description of Artificial Sequence: Synthetic polynucleotide"
  source 1..1359: mol_type = other DNA

SEQ ID NO: 2144 - DNA, 1359 bp, synthetic construct; identical to SEQ ID NO: 2139
  misc_feature 1..1359: note = source = /note="Description of Artificial Sequence: Synthetic polynucleotide"
  source 1..1359: mol_type = other DNA

SEQ ID NO: 2145 - DNA, 1359 bp, synthetic construct
  misc_feature 1..1359: note = source = /note="Description of Artificial Sequence: Synthetic polynucleotide"
  source 1..1359: mol_type = other DNA
caggtgcagctggtacagtctggggctgaggtgaagaagcctggggcctcagtgaaggtctcctgcaaggcttctggatacaccttcaccggctactatatacactgggtgcgtcaggcccctggacaagggcttgagtggatggggtggatcagccctaacagtggtgaaacaagctatgcacagaagtttcaggacagggtcaccatgaccagggacacgtccatcagcacagcctatatggagctgagcagcctgagatctgacgacacggccgtgtatttctgtgcgagagaggccacgatttttggaatgcttattgtaccatttgactactggggccagggaaccctggtcaccgtctcctcagcctccaccaagggcccatcggtcttccccctggcaccctcctccaagagcacctctgggggcacagcggccctgggctgcctggtcaaggactacttccccgaaccggtgacggtgtcgtggaactcaggcgccctgaccagcggcgtgcacaccttcccggctgtcctacagtcctcaggactctactccctcagcagcgtggtgaccgtgccctccagcagcttgggcacccagacctacatctgcaacgtgaatcacaagcccagcaacaccaaggtggacaagaaagttgagcccaaatcttgtgacaaaactcacacatgcccaccgtgcccagcacctgaactcctggggggaccgtcagtcttcctcttccccccaaaacccaaggacaccctcatgatctcccggacccctgaggtcacatgcgtggtggtggacgtgagccacgaagaccctgaggtcaagttcaactggtacgtggacggcgtggaggtgcataatgccaagacaaagccgtgtgaggagcagtacggcagcacgtaccgttgtgtcagcgtcctcaccgtcctgcaccaggactggctgaatggcaaggagtacaagtgcaaggtctccaacaaagccctcccagcccccatcgagaaaaccatctccaaagccaaagggcagccccgagaaccacaggtgtacaccctgcccccatcccgggaggagatgaccaagaaccaggtcagcctgacctgcctggtcaaaggcttctatcccagcgacatcgccgtggagtgggagagcaatgggcagccggagaacaactacaagaccacgcctcccgtgctggactccgacggctccttcttcctctatagcaagctcaccgtggacaagagcaggtggcagcaggggaacgtcttctcatgctccgtgatgcatgaggctctgcacaaccactacacgcagaagagcctctccctgtctccgggtaaa

SEQ ID NO: 2146 - DNA, 1359 bp, synthetic construct
  misc_feature 1..1359: note = source = /note="Description of Artificial Sequence: Synthetic polynucleotide"
  source 1..1359: mol_type = other DNA
caggtgcagctggtacagtctggggctgaggtgaagaagcctggggcctcagtgaaggtctcctgcaaggcttctggatacaccttcaccggctactatatacactgggtgcgtcaggcccctggacaagggcttgagtggatggggtggatcagccctaacagtggtgaaacaagctatgcacagaagtttcaggacagggtcaccatgaccagggacacgtccatcagcacagcctatatggagctgagcagactgagatctgacgacacggccgtgtatttctgtgcgagagaggccacgatttttggaatgcttattgtaccatttgactactggggccagggaaccctggtcaccgtctcctcagcctccaccaagggcccatcggtcttccccctggcaccctcctccaagagcacctctgggggcacagcggccctgggctgcctggtcaaggactacttccccgaaccggtgacggtgtcgtggaactcaggcgccctgaccagcggcgtgcacaccttcccggctgtcctacagtcctcaggactctactccctcagcagcgtggtgaccgtgccctccagcagcttgggcacccagacctacatctgcaacgtgaatcacaagcccagcaacaccaaggtggacaagaaagttgagcccaaatcttgtgacaaaactcacacatgcccaccgtgcccagcacctgaactcctggggggaccgtcagtcttcctcttccccccaaaacccaaggacaccctcatgatctcccggacccctgaggtcacatgcgtggtggtggacgtgagccacgaagaccctgaggtcaagttcaactggtacgtggacggcgtggaggtgcataatgccaagacaaagccgtgtgaggagcagtacggcagcacgtaccgttgtgtcagcgtcctcaccgtcctgcaccaggactggctgaatggcaaggagtacaagtgcaaggtctccaacaaagccctcccagcccccatcgagaaaaccatctccaaagccaaagggcagccccgagaaccacaggtgtacaccctgcccccatcccgggaggagatgaccaagaaccaggtcagcctgacctgcctggtcaaaggcttctatcccagcgacatcgccgtggagtgggagagcaatgggcagccggagaacaactacaagaccacgcctcccgtgctggactccgacggctccttcttcctctatagcaagctcaccgtggacaagagcaggtggcagcaggggaacgtcttctcatgctccgtgatgcatgaggctctgcacaaccactacacgcagaagagcctctccctgtctccgggtaaa

SEQ ID NO: 2147 - DNA, 1359 bp, synthetic construct
  misc_feature 1..1359: note = source = /note="Description of Artificial Sequence: Synthetic polynucleotide"
  source 1..1359: mol_type = other DNA
caggtgccgctggtgcagtctggggctgaggtgaagaagcctggggcctcagtgaaggtctcctgcaaggcttctggatacaccttcaccggctactatatccactgggtgcgacaggcccctggacaaggacttgagtggatggggtggatcaaccctgaaagtggtggcacagactattcacagaggtttcagggcagggtcaccatgaccagggacacgtccatcagcacagcctacatggaactgagcaggctgagatctgacgacacggccgtgtattactgtgcgagagaggccacgatttttggaatggttattgtaccgtttgactactggggccagggaaccctggtcaccgtctcctcagcctccaccaagggcccatcggtcttccccctggcaccctcctccaagagcacctctgggggcacagcggccctgggctgcctggtcaaggactacttccccgaaccggtgacggtgtcgtggaactcaggcgccctgaccagcggcgtgcacaccttcccggctgtcctacagtcctcaggactctactccctcagcagcgtggtgaccgtgccctccagcagcttgggcacccagacctacatctgcaacgtgaatcacaagcccagcaacaccaaggtggacaagaaagttgagcccaaatcttgtgacaaaactcacacatgcccaccgtgcccagcacctgaactcctggggggaccgtcagtcttcctcttccccccaaaacccaaggacaccctcatgatctcccggacccctgaggtcacatgcgtggtggtggacgtgagccacgaagaccctgaggtcaagttcaactggtacgtggacggcgtggaggtgcataatgccaagacaaagccgtgtgaggagcagtacggcagcacgtaccgttgtgtcagcgtcctcaccgtcctgcaccaggactggctgaatggcaaggagtacaagtgcaaggtctccaacaaagccctcccagcccccatcgagaaaaccatctccaaagccaaagggcagccccgagaaccacaggtgtacaccctgcccccatcccgggaggagatgaccaagaaccaggtcagcctgacctgcctggtcaaaggcttctatcccagcgacatcgccgtggagtgggagagcaatgggcagccggagaacaactacaagaccacgcctcccgtgctggactccgacggctccttcttcctctatagcaagctcaccgtggacaagagcaggtggcagcaggggaacgtcttctcatgctccgtgatgcatgaggctctgcacaaccactacacgcagaagagcctctccctgtctccgggtaaa

SEQ ID NO: 2148 - DNA, 1359 bp, synthetic construct
  misc_feature 1..1359: note = source = /note="Description of Artificial Sequence: Synthetic polynucleotide"
  source 1..1359: mol_type = other DNA
caggtgccgctggtgcagtctggggctgaggtgaagaagcctggggcctcagtgaaggtctcctgcaaggcttctggatacaccttcaccggctactatatccactgggtgcgacaggcccctggacaaggacttgagtggatggggtggatcaaccctgaaagtggtggcacagactattcacagaggtttcagggcaggttcaccatgaccagggacacgtccatcagcacagcctacatggaactgagcaggctgagatctgacgacacggccgtgtattactgtgcgagagaggccacgatttttggaatggttattgtaccgtttgactactggggccagggaaccctggtcaccgtctcctcagcctccaccaagggcccatcggtcttccccctggcaccctcctccaagagcacctctgggggcacagcggccctgggctgcctggtcaaggactacttccccgaaccggtgacggtgtcgtggaactcaggcgccctgaccagcggcgtgcacaccttcccggctgtcctacagtcctcaggactctactccctcagcagcgtggtgaccgtgccctccagcagcttgggcacccagacctacatctgcaacgtgaatcacaagcccagcaacaccaaggtggacaagaaagttgagcccaaatcttgtgacaaaactcacacatgcccaccgtgcccagcacctgaactcctggggggaccgtcagtcttcctcttccccccaaaacccaaggacaccctcatgatctcccggacccctgaggtcacatgcgtggtggtggacgtgagccacgaagaccctgaggtcaagttcaactggtacgtggacggcgtggaggtgcataatgccaagacaaagccgtgtgaggagcagtacggcagcacgtaccgttgtgtcagcgtcctcaccgtcctgcaccaggactggctgaatggcaaggagtacaagtgcaaggtctccaacaaagccctcccagcccccatcgagaaaaccatctccaaagccaaagggcagccccgagaaccacaggtgtacaccctgcccccatcccgggaggagatgaccaagaaccaggtcagcctgacctgcctggtcaaaggcttctatcccagcgacatcgccgtggagtgggagagcaatgggcagccggagaacaactacaagaccacgcctcccgtgctggactccgacggctccttcttcctctatagcaagctcaccgtggacaagagcaggtggcagcaggggaacgtcttctcatgctccgtgatgcatgaggctctgcacaaccactacacgcagaagagcctctccctgtctccgggtaaa

SEQ ID NO: 2149 - DNA, 1359 bp, synthetic construct
  misc_feature 1..1359: note = source = /note="Description of Artificial Sequence: Synthetic polynucleotide"
  source 1..1359: mol_type = other DNA
caggtgccgctggtgcagtctggggctgaggtgaagaagcctggggcctcagtgaaggtctcctgcaaggcttctggatacaccttcaccggctactatatccactgggtgcgacaggcccctggacaaggacttgagtggatggggtggatcaaccctgacagtggtggcacagactattcacagaggtttcagggcagggtcaccatgaccagggacacgtccatcagcacagcctacatggaactgagcaggctgagatctgacgacacggccgtgtattactgtgcgagagaggccacgatttttggaatggttattgtaccgtttgactactggggccagggaaccctggtcaccgtctcctcagcctccaccaagggcccatcggtcttccccctggcaccctcctccaagagcacctctgggggcacagcggccctgggctgcctggtcaaggactacttccccgaaccggtgacggtgtcgtggaactcaggcgccctgaccagcggcgtgcacaccttcccggctgtcctacagtcctcaggactctactccctcagcagcgtggtgaccgtgccctccagcagcttgggcacccagacctacatctgcaacgtgaatcacaagcccagcaacaccaaggtggacaagaaagttgagcccaaatcttgtgacaaaactcacacatgcccaccgtgcccagcacctgaactcctggggggaccgtcagtcttcctcttccccccaaaacccaaggacaccctcatgatctcccggacccctgaggtcacatgcgtggtggtggacgtgagccacgaagaccctgaggtcaagttcaactggtacgtggacggcgtggaggtgcataatgccaagacaaagccgtgtgaggagcagtacggcagcacgtaccgttgtgtcagcgtcctcaccgtcctgcaccaggactggctgaatggcaaggagtacaagtgcaaggtctccaacaaagccctcccagcccccatcgagaaaaccatctccaaagccaaagggcagccccgagaaccacaggtgtacaccctgcccccatcccgggaggagatgaccaagaaccaggtcagcctgacctgcctggtcaaaggcttctatcccagcgacatcgccgtggagtgggagagcaatgggcagccggagaacaactacaagaccacgcctcccgtgctggactccgacggctccttcttcctctatagcaagctcaccgtggacaagagcaggtggcagcaggggaacgtcttctcatgctccgtgatgcatgaggctctgcacaaccactacacgcagaagagcctctccctgtctccgggtaaa

SEQ ID NO: 2150 - DNA, 1359 bp, synthetic construct
  misc_feature 1..1359: note = source = /note="Description of Artificial Sequence: Synthetic polynucleotide"
  source 1..1359: mol_type = other DNA
caggtgcagctggtgcagtctggggctgaggtgaagaagcctggggcctcagtgaaggtctcctgcaaggcttctggatacaccttcaccggctactatatccactgggtgcgacaggcccctggacaaggacttgagtggatggggtggatcaaccctgaaagtggtggcacagactattcacagaggtttcagggcagggtcaccatgaccagggacacgtccatcagcacagcctacatggaactgagcagcctgagatctgacgacacggccgtgtattactgtgcgagagaggccacgatttttggaatggttattgtaccgtttgactactggggccagggaaccctggtcaccgtctcctcagcctccaccaagggcccatcggtcttccccctggcaccctcctccaagagcacctctgggggcacagcggccctgggctgcctggtcaaggactacttccccgaaccggtgacggtgtcgtggaactcaggcgccctgaccagcggcgtgcacaccttcccggctgtcctacagtcctcaggactctactccctcagcagcgtggtgaccgtgccctccagcagcttgggcacccagacctacatctgcaacgtgaatcacaagcccagcaacaccaaggtggacaagaaagttgagcccaaatcttgtgacaaaactcacacatgcccaccgtgcccagcacctgaactcctggggggaccgtcagtcttcctcttccccccaaaacccaaggacaccctcatgatctcccggacccctgaggtcacatgcgtggtggtggacgtgagccacgaagaccctgaggtcaagttcaactggtacgtggacggcgtggaggtgcataatgccaagacaaagccgtgtgaggagcagtacggcagcacgtaccgttgtgtcagcgtcctcaccgtcctgcaccaggactggctgaatggcaaggagtacaagtgcaaggtctccaacaaagccctcccagcccccatcgagaaaaccatctccaaagccaaagggcagccccgagaaccacaggtgtacaccctgcccccatcccgggaggagatgaccaagaaccaggtcagcctgacctgcctggtcaaaggcttctatcccagcgacatcgccgtggagtgggagagcaatgggcagccggagaacaactacaagaccacgcctcccgtgctggactccgacggctccttcttcctctatagcaagctcaccgtggacaagagcaggtggcagcaggggaacgtcttctcatgctccgtgatgcatgaggctctgcacaaccactacacgcagaagagcctctccctgtctccgggtaaa

SEQ ID NO: 2151 - DNA, 1359 bp, synthetic construct; identical to SEQ ID NO: 2147
  misc_feature 1..1359: note = source = /note="Description of Artificial Sequence: Synthetic polynucleotide"
  source 1..1359: mol_type = other DNA

SEQ ID NO: 2152 - DNA, 1359 bp, synthetic construct
  misc_feature 1..1359: note = source = /note="Description of Artificial Sequence: Synthetic polynucleotide"
  source 1..1359: mol_type = other DNA
caggtgccgctggtgcagtctggggctgaggtgaagaagcctggggcctcagtgaaggtctcctgcaaggcttctggatacaccttcaccggctactatatacactgggtgcgtcaggcccctggacaagggcttgagtggatggggtggataagccctaaccaaggtgaaacaaactatgcacagaagtttcaggacagggtcaccatgaccagggacacgtccatcagcacagcctatatggagctgagcaggctgagatctgacgacacggccgtgtattactgtgcgagagaggccacgatttttggaatgcttattgtaccatttgactactggggccagggaaccctggtcaccgtctcctcagcctccaccaagggcccatcggtcttccccctggcaccctcctccaagagcacctctgggggcacagcggccctgggctgcctggtcaaggactacttccccgaaccggtgacggtgtcgtggaactcaggcgccctgaccagcggcgtgcacaccttcccggctgtcctacagtcctcaggactctactccctcagcagcgtggtgaccgtgccctccagcagcttgggcacccagacctacatctgcaacgtgaatcacaagcccagcaacaccaaggtggacaagaaagttgagcccaaatcttgtgacaaaactcacacatgcccaccgtgcccagcacctgaactcctggggggaccgtcagtcttcctcttccccccaaaacccaaggacaccctcatgatctcccggacccctgaggtcacatgcgtggtggtggacgtgagccacgaagaccctgaggtcaagttcaactggtacgtggacggcgtggaggtgcataatgccaagacaaagccgtgtgaggagcagtacggcagcacgtaccgttgtgtcagcgtcctcaccgtcctgcaccaggactggctgaatggcaaggagtacaagtgcaaggtctccaacaaagccctcccagcccccatcgagaaaaccatctccaaagccaaagggcagccccgagaaccacaggtgtacaccctgcccccatcccgggaggagatgaccaagaaccaggtcagcctgacctgcctggtcaaaggcttctatcccagcgacatcgccgtggagtgggagagcaatgggcagccggagaacaactacaagaccacgcctcccgtgctggactccgacggctccttcttcctctatagcaagctcaccgtggacaagagcaggtggcagcaggggaacgtcttctcatgctccgtgatgcatgaggctctgcacaaccactacacgcagaagagcctctccctgtctccgggtaaa

SEQ ID NO: 2153 - DNA, 1359 bp, synthetic construct
  misc_feature 1..1359: note = source = /note="Description of Artificial Sequence: Synthetic polynucleotide"
  source 1..1359: mol_type = other DNA
caggtgccgctggtgcagtctggggctgaggtgaagaagcctggggcctcagtgaaggtctcctgcaaggcttctggatacaccttcaccggctactatatacactgggtgcgtcaggcccctggacaagggcttgagtggatggggtggataagccctaaccaaggtgacacaaactatgcacagaagtttcaggacagggtcaccatgaccagggacacgtccatcagcacagcctatatggagctgagcaggctgagatctgacgacacggccgtgtattactgtgcgagagaggccacgatttttggaatgcttattgtaccatttgactactggggccagggaaccctggtcaccgtctcctcagcctccaccaagggcccatcggtcttccccctggcaccctcctccaagagcacctctgggggcacagcggccctgggctgcctggtcaaggactacttccccgaaccggtgacggtgtcgtggaactcaggcgccctgaccagcggcgtgcacaccttcccggctgtcctacagtcctcaggactctactccctcagcagcgtggtgaccgtgccctccagcagcttgggcacccagacctacatctgcaacgtgaatcacaagcccagcaacaccaaggtggacaagaaagttgagcccaaatcttgtgacaaaactcacacatgcccaccgtgcccagcacctgaactcctggggggaccgtcagtcttcctcttccccccaaaacccaaggacaccctcatgatctcccggacccctgaggtcacatgcgtggtggtggacgtgagccacgaagaccctgaggtcaagttcaactggtacgtggacggcgtggaggtgcataatgccaagacaaagccgtgtgaggagcagtacggcagcacgtaccgttgtgtcagcgtcctcaccgtcctgcaccaggactggctgaatggcaaggagtacaagtgcaaggtctccaacaaagccctcccagcccccatcgagaaaaccatctccaaagccaaagggcagccccgagaaccacaggtgtacaccctgcccccatcccgggaggagatgaccaagaaccaggtcagcctgacctgcctggtcaaaggcttctatcccagcgacatcgccgtggagtgggagagcaatgggcagccggagaacaactacaagaccacgcctcccgtgctggactccgacggctccttcttcctctatagcaagctcaccgtggacaagagcaggtggcagcaggggaacgtcttctcatgctccgtgatgcatgaggctctgcacaaccactacacgcagaagagcctctccctgtctccgggtaaa

SEQ ID NO: 2154 - DNA, 1359 bp, synthetic construct
  misc_feature 1..1359: note = source = /note="Description of Artificial Sequence: Synthetic polynucleotide"
  source 1..1359: mol_type = other DNA
caggtgccgctggtgcagtctggggctgaggtgaagaagcctggggcctcagtgaaggtctcctgcaaggcttctggatacaccttcaccggctactatatacactgggtgcgtcaggcccctggacaagggcttgagtggatggggtggataagccctaaccaaggtgaaacaaactatgcacagaagtttcaggacagggtcaccatgaccagggacacgtccatcagcacagcctatatggagctgagcaggctgagatctgacgacacggccgtgtattactgtacgagagaggccacgatttttggaatgcttattgtaccatttgactactggggccagggaaccctggtcaccgtctcctcagcctccaccaagggcccatcggtcttccccctggcaccctcctccaagagcacctctgggggcacagcggccctgggctgcctggtcaaggactacttccccgaaccggtgacggtgtcgtggaactcaggcgccctgaccagcggcgtgcacaccttcccggctgtcctacagtcctcaggactctactccctcagcagcgtggtgaccgtgccctccagcagcttgggcacccagacctacatctgcaacgtgaatcacaagcccagcaacaccaaggtggacaagaaagttgagcccaaatcttgtgacaaaactcacacatgcccaccgtgcccagcacctgaactcctggggggaccgtcagtcttcctcttccccccaaaacccaaggacaccctcatgatctcccggacccctgaggtcacatgcgtggtggtggacgtgagccacgaagaccctgaggtcaagttcaactggtacgtggacggcgtggaggtgcataatgccaagacaaagccgtgtgaggagcagtacggcagcacgtaccgttgtgtcagcgtcctcaccgtcctgcaccaggactggctgaatggcaaggagtacaagtgcaaggtctccaacaaagccctcccagcccccatcgagaaaaccatctccaaagccaaagggcagccccgagaaccacaggtgtacaccctgcccccatcccgggaggagatgaccaagaaccaggtcagcctgacctgcctggtcaaaggcttctatcccagcgacatcgccgtggagtgggagagcaatgggcagccggagaacaactacaagaccacgcctcccgtgctggactccgacggctccttcttcctctatagcaagctcaccgtggacaagagcaggtggcagcaggggaacgtcttctcatgctccgtgatgcatgaggctctgcacaaccactacacgcagaagagcctctccctgtctccgggtaaa

SEQ ID NO: 2155 - DNA, 1359 bp, synthetic construct
  misc_feature 1..1359: note = source = /note="Description of Artificial Sequence: Synthetic polynucleotide"
  source 1..1359: mol_type = other DNA
caggtgccgctggtgcagtctggggctgaggtgaagaagcctggggcctcagtgaaggtctcctgcaaggcttctggatacaccttcaccggctactatatacactgggtgcgtcaggcccctggacaagggcttgagtggatggggtggataagccctaacaatggtgaaacaaactatgcacagaagtttcaggacagggtcaccatgaccagggacacgtccatcagcacagcctatatggagctgagcaggctgagatctgacgacacggccgtgtattactgtgcgagagaggccacgatttttggaatgcttattgtaccatttgactactggggccagggaaccctggtcaccgtctcctcagcctccaccaagggcccatcggtcttccccctggcaccctcctccaagagcacctctgggggcacagcggccctgggctgcctggtcaaggactacttccccgaaccggtgacggtgtcgtggaactcaggcgccctgaccagcggcgtgcacaccttcccggctgtcctacagtcctcaggactctactccctcagcagcgtggtgaccgtgccctccagcagcttgggcacccagacctacatctgcaacgtgaatcacaagcccagcaacaccaaggtggacaagaaagttgagcccaaatcttgtgacaaaactcacacatgcccaccgtgcccagcacctgaactcctggggggaccgtcagtcttcctcttccccccaaaacccaaggacaccctcatgatctcccggacccctgaggtcacatgcgtggtggtggacgtgagccacgaagaccctgaggtcaagttcaactggtacgtggacggcgtggaggtgcataatgccaagacaaagccgtgtgaggagcagtacggcagcacgtaccgttgtgtcagcgtcctcaccgtcctgcaccaggactggctgaatggcaaggagtacaagtgcaaggtctccaacaaagccctcccagcccccatcgagaaaaccatctccaaagccaaagggcagccccgagaaccacaggtgtacaccctgcccccatcccgggaggagatgaccaagaaccaggtcagcctgacctgcctggtcaaaggcttctatcccagcgacatcgccgtggagtgggagagcaatgggcagccggagaacaactacaagaccacgcctcccgtgctggactccgacggctccttcttcctctatagcaagctcaccgtggacaagagcaggtggcagcaggggaacgtcttctcatgctccgtgatgcatgaggctctgcacaaccactacacgcagaagagcctctccctgtctccgggtaaa

SEQ ID NO: 2156 - DNA, 1359 bp, synthetic construct
  misc_feature 1..1359: note = source = /note="Description of Artificial Sequence: Synthetic polynucleotide"
  source 1..1359: mol_type = other DNA
caggtgccgctggtgcagtctggggctgaggtgaagaagcctggggcctcagtgaaggtctcctgcaaggcttctggatacaccttcaccggctactatatacactgggtgcgtcaggcccctggacaagggcttgagtggatggggtggataagccctaacaatggtgacacaaactatgcacagaagtttcaggacagggtcaccatgaccagggacacgtccatcagcacagcctatatggagctgagcaggctgagatctgacgacacggccgtgtattactgtgcgagagaggccacgatttttggaatgcttattgtaccatttgactactggggccagggaaccctggtcaccgtctcctcagcctccaccaagggcccatcggtcttccccctggcaccctcctccaagagcacctctgggggcacagcggccctgggctgcctggtcaaggactacttccccgaaccggtgacggtgtcgtggaactcaggcgccctgaccagcggcgtgcacaccttcccggctgtcctacagtcctcaggactctactccctcagcagcgtggtgaccgtgccctccagcagcttgggcacccagacctacatctgcaacgtgaatcacaagcccagcaacaccaaggtggacaagaaagttgagcccaaatcttgtgacaaaactcacacatgcccaccgtgcccagcacctgaactcctggggggaccgtcagtcttcctcttccccccaaaacccaaggacaccctcatgatctcccggacccctgaggtcacatgcgtggtggtggacgtgagccacgaagaccctgaggtcaagttcaactggtacgtggacggcgtggaggtgcataatgccaagacaaagccgtgtgaggagcagtacggcagcacgtaccgttgtgtcagcgtcctcaccgtcctgcaccaggactggctgaatggcaaggagtacaagtgcaaggtctccaacaaagccctcccagcccccatcgagaaaaccatctccaaagccaaagggcagccccgagaaccacaggtgtacaccctgcccccatcccgggaggagatgaccaagaaccaggtcagcctgacctgcctggtcaaaggcttctatcccagcgacatcgccgtggagtgggagagcaatgggcagccggagaacaactacaagaccacgcctcccgtgctggactccgacggctccttcttcctctatagcaagctcaccgtggacaagagcaggtggcagcaggggaacgtcttctcatgctccgtgatgcatgaggctctgcacaaccactacacgcagaagagcctctccctgtctccgggtaaa

SEQ ID NO: 2157 - DNA, 1359 bp, synthetic construct
  misc_feature 1..1359: note = source = /note="Description of Artificial Sequence: Synthetic polynucleotide"
  source 1..1359: mol_type = other DNA
caggtgccgctggtgcagtctggggctgaggtgaagaagcctggggcctcagtgaaggtctcctgcaaggcttctggatacaccttcaccggctactatatacactgggtgcgtcaggcccctggacaagggcttgagtggatggggtggataagccctaaccaaggtgacacaaactatgcacagaagtttcaggacagggtcaccatgaccagggacacgtccatcagcacagcctatatggagctgagcaggctgagatctgacgacacggccgtgtattactgtacgagagaggccacgatttttggaatgcttattgtaccatttgactactggggccagggaaccctggtcaccgtctcctcagcctccaccaagggcccatcggtcttccccctggcaccctcctccaagagcacctctgggggcacagcggccctgggctgcctggtcaaggactacttccccgaaccggtgacggtgtcgtggaactcaggcgccctgaccagcggcgtgcacaccttcccggctgtcctacagtcctcaggactctactccctcagcagcgtggtgaccgtgccctccagcagcttgggcacccagacctacatctgcaacgtgaatcacaagcccagcaacaccaaggtggacaagaaagttgagcccaaatcttgtgacaaaactcacacatgcccaccgtgcccagcacctgaactcctggggggaccgtcagtcttcctcttccccccaaaacccaaggacaccctcatgatctcccggacccctgaggtcacatgcgtggtggtggacgtgagccacgaagaccctgaggtcaagttcaactggtacgtggacggcgtggaggtgcataatgccaagacaaagccgtgtgaggagcagtacggcagcacgtaccgttgtgtcagcgtcctcaccgtcctgcaccaggactggctgaatggcaaggagtacaagtgcaaggtctccaacaaagccctcccagcccccatcgagaaaaccatctccaaagccaaagggcagccccgagaaccacaggtgtacaccctgcccccatcccgggaggagatgaccaagaaccaggtcagcctgacctgcctggtcaaaggcttctatcccagcgacatcgccgtggagtgggagagcaatgggcagccggagaacaactacaagaccacgcctcccgtgctggactccgacggctccttcttcctctatagcaagctcaccgtggacaagagcaggtggcagcaggggaacgtcttctcatgctccgtgatgcatgaggctctgcacaaccactacacgcagaagagcctctccctgtctccgggtaaa

SEQ ID NO: 2158 - DNA, 1359 bp, synthetic construct
  misc_feature 1..1359: note = source = /note="Description of Artificial Sequence: Synthetic polynucleotide"
  source 1..1359: mol_type = other DNA
caggtgccgctggtgcagtctggggctgaggtgaagaagcctggggcctcagtgaaggtctcctgcaaggcttctggatacaccttcaccggctactatatacactgggtgcgtcaggcccctggacaagggcttgagtggatggggtggataagccctaacaatggtgaaacaaactatgcacagaagtttcaggacagggtcaccatgaccagggacacgtccatcagcacagcctatatggagctgagcaggctgagatctgacgacacggccgtgtattactgtacgagagaggccacgatttttggaatgcttattgtaccatttgactactggggccagggaaccctggtcaccgtctcctcagcctccaccaagggcccatcggtcttccccctggcaccctcctccaagagcacctctgggggcacagcggccctgggctgcctggtcaaggactacttccccgaaccggtgacggtgtcgtggaactcaggcgccctgaccagcggcgtgcacaccttcccggctgtcctacagtcctcaggactctactccctcagcagcgtggtgaccgtgccctccagcagcttgggcacccagacctacatctgcaacgtgaatcacaagcccagcaacaccaaggtggacaagaaagttgagcccaaatcttgtgacaaaactcacacatgcccaccgtgcccagcacctgaactcctggggggaccgtcagtcttcctcttccccccaaaacccaaggacaccctcatgatctcccggacccctgaggtcacatgcgtggtggtggacgtgagccacgaagaccctgaggtcaagttcaactggtacgtggacggcgtggaggtgcataatgccaagacaaagccgtgtgaggagcagtacggcagcacgtaccgttgtgtcagcgtcctcaccgtcctgcaccaggactggctgaatggcaaggagtacaagtgcaaggtctccaacaaagccctcccagcccccatcgagaaaaccatctccaaagccaaagggcagccccgagaaccacaggtgtacaccctgcccccatcccgggaggagatgaccaagaaccaggtcagcctgacctgcctggtcaaaggcttctatcccagcgacatcgccgtggagtgggagagcaatgggcagccggagaacaactacaagaccacgcctcccgtgctggactccgacggctccttcttcctctatagcaagctcaccgtggacaagagcaggtggcagcaggggaacgtcttctcatgctccgtgatgcatgaggctctgcacaaccactacacgcagaagagcctctccctgtctccgggtaaa

SEQ ID NO: 2159 - DNA, 1359 bp, synthetic construct; identical to SEQ ID NO: 2152
  misc_feature 1..1359: note = source = /note="Description of Artificial Sequence: Synthetic polynucleotide"
  source 1..1359: mol_type = other DNA

SEQ ID NO: 2160 - DNA, 1359 bp, synthetic construct; identical to SEQ ID NO: 2156
  misc_feature 1..1359: note = source = /note="Description of Artificial Sequence: Synthetic polynucleotide"
  source 1..1359: mol_type = other DNA

SEQ ID NO: 2161 - DNA, 1359 bp, synthetic construct; identical to SEQ ID NO: 2153
  misc_feature 1..1359: note = source = /note="Description of Artificial Sequence: Synthetic polynucleotide"
  source 1..1359: mol_type = other DNA

SEQ ID NO: 2162 - DNA, 1359 bp, synthetic construct; identical to SEQ ID NO: 2155
  misc_feature 1..1359: note = source = /note="Description of Artificial Sequence: Synthetic polynucleotide"
  source 1..1359: mol_type = other DNA

SEQ ID NO: 2163 - DNA, 1359 bp, synthetic construct
  misc_feature 1..1359: note = source = /note="Description of Artificial Sequence: Synthetic polynucleotide"
  source 1..1359: mol_type = other DNA
caggtgcagctggtgcagtctggggctgaggtgaagaagcctggggcctcagtgaaggtctcctgcaaggcttctggatacaccttcaccggctactatatacactgggtgcgtcaggcccctggacaagggcttgagtggatggggtggataagccctaaccaaggtgaaacaaactatgcacagaagtttcaggacagggtcaccatgaccagggacacgtccatcagcacagcctatatggagctgagcagcctgagatctgacgacacggccgtgtattactgtgcgagagaggccacgatttttggaatgcttattgtaccatttgactactggggccagggaaccctggtcaccgtctcctcagcctccaccaagggcccatcggtcttccccctggcaccctcctccaagagcacctctgggggcacagcggccctgggctgcctggtcaaggactacttccccgaaccggtgacggtgtcgtggaactcaggcgccctgaccagcggcgtgcacaccttcccggctgtcctacagtcctcaggactctactccctcagcagcgtggtgaccgtgccctccagcagcttgggcacccagacctacatctgcaacgtgaatcacaagcccagcaacaccaaggtggacaagaaagttgagcccaaatcttgtgacaaaactcacacatgcccaccgtgcccagcacctgaactcctggggggaccgtcagtcttcctcttccccccaaaacccaaggacaccctcatgatctcccggacccctgaggtcacatgcgtggtggtggacgtgagccacgaagaccctgaggtcaagttcaactggtacgtggacggcgtggaggtgcataatgccaagacaaagccgtgtgaggagcagtacggcagcacgtaccgttgtgtcagcgtcctcaccgtcctgcaccaggactggctgaatggcaaggagtacaagtgcaaggtctccaacaaagccctcccagcccccatcgagaaaaccatctccaaagccaaagggcagccccgagaaccacaggtgtacaccctgcccccatcccgggaggagatgaccaagaaccaggtcagcctgacctgcctggtcaaaggcttctatcccagcgacatcgccgtggagtgggagagcaatgggcagccggagaacaactacaagaccacgcctcccgtgctggactccgacggctccttcttcctctatagcaagctcaccgtggacaagagcaggtggcagcaggggaacgtcttctcatgctccgtgatgcatgaggctctgcacaaccactacacgcagaagagcctctccctgtctccgggtaaa

SEQ ID NO: 2164 - DNA, 1359 bp, synthetic construct; identical to SEQ ID NO: 2163
  misc_feature 1..1359: note = source = /note="Description of Artificial Sequence: Synthetic polynucleotide"
  source 1..1359: mol_type = other DNA

SEQ ID NO: 2165 - DNA, 1374 bp, synthetic construct; identical to SEQ ID NO: 2042
  misc_feature 1..1374: note = source = /note="Description of Artificial Sequence: Synthetic polynucleotide"
  source 1..1374: mol_type = other DNA

SEQ ID NO: 2166 - DNA, 1374 bp, synthetic construct; identical to SEQ ID NO: 2042
  misc_feature 1..1374: note = source = /note="Description of Artificial Sequence: Synthetic polynucleotide"
  source 1..1374: mol_type = other DNA

SEQ ID NO: 2167 - DNA, 1374 bp, synthetic construct; identical to SEQ ID NO: 2042
  misc_feature 1..1374: note = source = /note="Description of Artificial Sequence: Synthetic polynucleotide"
  source 1..1374: mol_type = other DNA

SEQ ID NO: 2168 - DNA, 1374 bp, synthetic construct; identical to SEQ ID NO: 2042
  misc_feature 1..1374: note = source = /note="Description of Artificial Sequence: Synthetic polynucleotide"
  source 1..1374: mol_type = other DNA

SEQ ID NO: 2169 - DNA, 1374 bp, synthetic construct; identical to SEQ ID NO: 2042
  misc_feature 1..1374: note = source = /note="Description of Artificial Sequence: Synthetic polynucleotide"
  source 1..1374: mol_type = other DNA

SEQ ID NO: 2170 - DNA, 1374 bp, synthetic construct; identical to SEQ ID NO: 2042
  misc_feature 1..1374: note = source = /note="Description of Artificial Sequence: Synthetic polynucleotide"
  source 1..1374: mol_type = other DNA

SEQ ID NO: 2171 - DNA, 1374 bp, synthetic construct; identical to SEQ ID NO: 2042
  misc_feature 1..1374: note = source = /note="Description of Artificial Sequence: Synthetic polynucleotide"
  source 1..1374: mol_type = other DNA

SEQ ID NO: 2172 - DNA, 1374 bp, synthetic construct; identical to SEQ ID NO: 2042
  misc_feature 1..1374: note = source = /note="Description of Artificial Sequence: Synthetic polynucleotide"
  source 1..1374: mol_type = other DNA

SEQ ID NO: 2173 - DNA, 1374 bp, synthetic construct; identical to SEQ ID NO: 2042
  misc_feature 1..1374: note = source = /note="Description of Artificial Sequence: Synthetic polynucleotide"
  source 1..1374: mol_type = other DNA

SEQ ID NO: 2174 - DNA, 1374 bp, synthetic construct; identical to SEQ ID NO: 2042
  misc_feature 1..1374: note = source = /note="Description of Artificial Sequence: Synthetic polynucleotide"
  source 1..1374: mol_type = other DNA

SEQ ID NO: 2175 - DNA, 1374 bp, synthetic construct; identical to SEQ ID NO: 2042
  misc_feature 1..1374: note = source = /note="Description of Artificial Sequence: Synthetic polynucleotide"
  source 1..1374: mol_type = other DNA

SEQ ID NO: 2176 - DNA, 1374 bp, synthetic construct; identical to SEQ ID NO: 2042
  misc_feature 1..1374: note = source = /note="Description of Artificial Sequence: Synthetic polynucleotide"
  source 1..1374: mol_type = other DNA

SEQ ID NO: 2177 - DNA, 1374 bp, synthetic construct
  misc_feature 1..1374: note = source = /note="Description of Artificial Sequence: Synthetic polynucleotide"
  source 1..1374: mol_type = other DNA
cagatgcaggtggtgcagtctggggctgaggtgaagaagcctggggcctcagtgaaggtctcctgcaaggcttccggatacaccttcaccggctactatatgcattgggtgcgacaggcccctggacaagggcttgagtggatgggatggatcaaccctaacagtggtggcacaaactatgcacagaagtttcagggcagggtcaccatgaccagggacacgtccatcagtacagcctacatggagctgagcagcctgaggtctgacgacacggccgtgtattactgtgcgagagggggggattacgttttcgggacttatcggcctcactactactacggtatggacgtctggggccaagggaccacggtcaccgtctcctcagcctccaccaagggcccatcggtcttccccctggcaccctcctccaagagcacctctgggggcacagcggccctgggctgcctggtcaaggactacttccccgaaccggtgacggtgtcgtggaactcaggcgccctgaccagcggcgtgcacaccttcccggctgtcctacagtcctcaggactctactccctcagcagcgtggtgaccgtgccctccagcagcttgggcacccagacctacatctgcaacgtgaatcacaagcccagcaacaccaaggtggacaagaaagttgagcccaaatcttgtgacaaaactcacacatgcccaccgtgcccagcacctgaactcctggggggaccgtcagtcttcctcttccccccaaaacccaaggacaccctcatgatctcccggacccctgaggtcacatgcgtggtggtggacgtgagccacgaagaccctgaggtcaagttcaactggtacgtggacggcgtggaggtgcataatgccaagacaaagccgtgtgaggagcagtacggcagcacgtaccgttgtgtcagcgtcctcaccgtcctgcaccaggactggctgaatggcaaggagtacaagtgcaaggtctccaacaaagccctcccagcccccatcgagaaaaccatctccaaagccaaagggcagccccgagaaccacaggtgtacaccctgcccccatcccgggaggagatgaccaagaaccaggtcagcctgacctgcctggtcaaaggcttctatcccagcgacatcgccgtggagtgggagagcaatgggcagccggagaacaactacaagaccacgcctcccgtgctggactccgacggctccttcttcctctatagcaagctcaccgtggacaagagcaggtggcagcaggggaacgtcttctcatgctccgtgatgcatgaggctctgcacaaccactacacgcagaagagcctctccctgtctccgggtaaa

SEQ ID NO: 2178 - DNA, 1374 bp, synthetic construct
  misc_feature 1..1374: note = source = /note="Description of Artificial Sequence: Synthetic polynucleotide"
  source 1..1374: mol_type = other DNA
cagatgcaggtggtgcagtctggggctgaggtgaagaagcctggggcctcagtgaaggtctcctgcaaggcttccggatacaccttcaccggctactatatgcattgggtgcgacaggcccctggacaagggcttgagtggatgggatggatcaaccctaacagtggtggcacaaactatgcacagaagtttcagggcagggtcaccatgaccagggacacgtccatcagtacagcctacatggagctgagcaggctgaggtctgacgacacggccgtgtattactgtgcgagagggggggattacgttttcgggacttatcggcctcactactactacggtatggacgtctggggccaagggaccacggtcaccgtctcctcagcctccaccaagggcccatcggtcttccccctggcaccctcctccaagagcacctctgggggcacagcggccctgggctgcctggtcaaggactacttccccgaaccggtgacggtgtcgtggaactcaggcgccctgaccagcggcgtgcacaccttcccggctgtcctacagtcctcaggactctactccctcagcagcgtggtgaccgtgccctccagcagcttgggcacccagacctacatctgcaacgtgaatcacaagcccagcaacaccaaggtggacaagaaagttgagcccaaatcttgtgacaaaactcacacatgcccaccgtgcccagcacctgaactcctggggggaccgtcagtcttcctcttccccccaaaacccaaggacaccctcatgatctcccggacccctgaggtcacatgcgtggtggtggacgtgagccacgaagaccctgaggtcaagttcaactggtacgtggacggcgtggaggtgcataatgccaagacaaagccgtgtgaggagcagtacggcagcacgtaccgttgtgtcagcgtcctcaccgtcctgcaccaggactggctgaatggcaaggagtacaagtgcaaggtctccaacaaagccctcccagcccccatcgagaaaaccatctccaaagccaaagggcagccccgagaaccacaggtgtacaccctgcccccatcccgggaggagatgaccaagaaccaggtcagcctgacctgcctggtcaaaggcttctatcccagcgacatcgccgtggagtgggagagcaatgggcagccggagaacaactacaagaccacgcctcccgtgctggactccgacggctccttcttcctctatagcaagctcaccgtggacaagagcaggtggcagcaggggaacgtcttctcatgctccgtgatgcatgaggctctgcacaaccactacacgcagaagagcctctccctgtctccgggtaaa

SEQ ID NO: 2179 - DNA, 1353 bp, synthetic construct; identical to SEQ ID NO: 2079
  misc_feature 1..1353: note = source = /note="Description of Artificial Sequence: Synthetic polynucleotide"
  source 1..1353: mol_type = other DNA

SEQ ID NO: 2180 - DNA, 1353 bp, synthetic construct; identical to SEQ ID NO: 2061
  misc_feature 1..1353: note = source = /note="Description of Artificial Sequence: Synthetic polynucleotide"
  source 1..1353: mol_type = other DNA

SEQ ID NO: 2181 - DNA, 1374 bp, synthetic construct; identical to SEQ ID NO: 2042
  misc_feature 1..1374: note = source = /note="Description of Artificial Sequence: Synthetic polynucleotide"
  source 1..1374: mol_type = other DNA

SEQ ID NO: 2182 - DNA, 1353 bp, synthetic construct
  misc_feature 1..1353: note = source = /note="Description of Artificial Sequence: Synthetic polynucleotide"
  source 1..1353: mol_type = other DNA
caggtgcagttggtggagtctgggggaggcgtggtccagcctgggaggtccctgagactctcctgtacagcgtctggattcaccttcagtagctatggcatacactgggtccgccaggctccaggcaaggggctggagtgggtggcagttatatggtatgatggaagtaataagttccatgcagactccgtgaagggccgattcaccatctccagagacaattccaagaacacgctgtatctgcaaatgaacagcctgagagccgaggactcggctatgtacttctgtgcgagaggaaaagtggctggtatgcctgaagcttttgaaatctggggccaagggacaaaggtcaccgtctcttcagcctccaccaagggcccatcggtcttccccctggcaccctcctccaagagcacctctgggggcacagcggccctgggctgcctggtcaaggactacttccccgaaccggtgacggtgtcgtggaactcaggcgccctgaccagcggcgtgcacaccttcccggctgtcctacagtcctcaggactctactccctcagcagcgtggtgaccgtgccctccagcagcttgggcacccagacctacatctgcaacgtgaatcacaagcccagcaacaccaaggtggacaagaaagttgagcccaaatcttgtgacaaaactcacacatgcccaccgtgcccagcacctgaactcctggggggaccgtcagtcttcctcttccccccaaaacccaaggacaccctcatgatctcccggacccctgaggtcacatgcgtggtggtggacgtgagccacgaagaccctgaggtcaagttcaactggtacgtggacggcgtggaggtgcataatgccaagacaaagccgtgtgaggagcagtacggcagcacgtaccgttgtgtcagcgtcctcaccgtcctgcaccaggactggctgaatggcaaggagtacaagtgcaaggtctccaacaaagccctcccagcccccatcgagaaaaccatctccaaagccaaagggcagccccgagaaccacaggtgtacaccctgcccccatcccgggaggagatgaccaagaaccaggtcagcctgacctgcctggtcaaaggcttctatcccagcgacatcgccgtggagtgggagagcaatgggcagccggagaacaactacaagaccacgcctcccgtgctggactccgacggctccttcttcctctatagcaagctcaccgtggacaagagcaggtggcagcaggggaacgtcttctcatgctccgtgatgcatgaggctctgcacaaccactacacgcagaagagcctctccctgtctccgggtaaa

SEQ ID NO: 2183 - DNA, 1377 bp, synthetic construct
  misc_feature 1..1377: note = source = /note="Description of Artificial Sequence: Synthetic polynucleotide"
  source 1..1377: mol_type = other DNA
caaatgcagctggtgcagtctggggctgaggtgaagaagcctggggcctcagtgaaggtctcctgcaaggcttctggatacaccttcaccagttatgatatcaactgggtgcgacaggccactggacaagggcttgagtggatgggatggatgaaccctaacagtggtaacacaggctatgcacagaagttccagggcagagtcaccatgaccagggacacctccataagcacagcctacatggagctgagcagcctgagatctcaggacacggccgtgtattactgtgcgagagggggtgattacgtttgggggagttatcgtccctactactactactacggtatggacgtctggggccaagggaccacggtcaccgtctcctcagcctccaccaagggcccatcggtcttccccctggcaccctcctccaagagcacctctgggggcacagcggccctgggctgcctggtcaaggactacttccccgaaccggtgacggtgtcgtggaactcaggcgccctgaccagcggcgtgcacaccttcccggctgtcctacagtcctcaggactctactccctcagcagcgtggtgaccgtgccctccagcagcttgggcacccagacctacatctgcaacgtgaatcacaagcccagcaacaccaaggtggacaagaaagttgagcccaaatcttgtgacaaaactcacacatgcccaccgtgcccagcacctgaactcctggggggaccgtcagtcttcctcttccccccaaaacccaaggacaccctcatgatctcccggacccctgaggtcacatgcgtggtggtggacgtgagccacgaagaccctgaggtcaagttcaactggtacgtggacggcgtggaggtgcataatgccaagacaaagccgtgtgaggagcagtacggcagcacgtaccgttgtgtcagcgtcctcaccgtcctgcaccaggactggctgaatggcaaggagtacaagtgcaaggtctccaacaaagccctcccagcccccatcgagaaaaccatctccaaagccaaagggcagccccgagaaccacaggtgtacaccctgcccccatcccgggaggagatgaccaagaaccaggtcagcctgacctgcctggtcaaaggcttctatcccagcgacatcgccgtggagtgggagagcaatgggcagccggagaacaactacaagaccacgcctcccgtgctggactccgacggctccttcttcctctatagcaagctcaccgtggacaagagcaggtggcagcaggggaacgtcttctcatgctccgtgatgcatgaggctctgcacaaccactacacgcagaagagcctctccctgtctccgggtaaa

SEQ ID NO: 2184 - DNA, 1353 bp, synthetic construct
  misc_feature 1..1353: note = source = /note="Description of Artificial Sequence: Synthetic polynucleotide"
  source 1..1353: mol_type = other DNA
caggtgcagttggtggagtctgggggaggcgtggtccagcctgggaggtccctgagactctcctgtgcagcgtctggattcaccttcagtagctatggcatacactgggtccgccaggctccaggcaaggggctggagtgggtggcagttatatggtatgatgcaagtaataagttccatgcagacgccgtgaagggccgattcaccatctccagagacaattccaagaacacgctgtatctgcaaatgaacagcctgagagccgaggactcggctatgtacttctgtgcgagaggaaaagtggctggtatgcctgaagcttttgaaatctggggccaagggacaaaggtcaccgtctcttcagcctccaccaagggcccatcggtcttccccctggcaccctcctccaagagcacctctgggggcacagcggccctgggctgcctggtcaaggactacttccccgaaccggtgacggtgtcgtggaactcaggcgccctgaccagcggcgtgcacaccttcccggctgtcctacagtcctcaggactctactccctcagcagcgtggtgaccgtgccctccagcagcttgggcacccagacctacatctgcaacgtgaatcacaagcccagcaacaccaaggtggacaagaaagttgagcccaaatcttgtgacaaaactcacacatgcccaccgtgcccagcacctgaactcctggggggaccgtcagtcttcctcttccccccaaaacccaaggacaccctcatgatctcccggacccctgaggtcacatgcgtggtggtggacgtgagccacgaagaccctgaggtcaagttcaactggtacgtggacggcgtggaggtgcataatgccaagacaaagccgtgtgaggagcagtacggcagcacgtaccgttgtgtcagcgtcctcaccgtcctgcaccaggactggctgaatggcaaggagtacaagtgcaaggtctccaacaaagccctcccagcccccatcgagaaaaccatctccaaagccaaagggcagccccgagaaccacaggtgtacaccctgcccccatcccgggaggagatgaccaagaaccaggtcagcctgacctgcctggtcaaaggcttctatcccagcgacatcgccgtggagtgggagagcaatgggcagccggagaacaactacaagaccacgcctcccgtgctggactccgacggctccttcttcctctatagcaagctcaccgtggacaagagcaggtggcagcaggggaacgtcttctcatgctccgtgatgcatgaggctctgcacaaccactacacgcagaagagcctctccctgtctccgggtaaa

SEQ ID NO: 2185 - DNA, 1353 bp, synthetic construct
  misc_feature 1..1353: note = source = /note="Description of Artificial Sequence: Synthetic polynucleotide"
  source 1..1353: mol_type = other DNA
caggtgcagttggtggagtctgggggaggcgtggtccagcctgggaggtccctgagactctcctgtacagcgtctggattcaccttcagtagctatggcatacactgggtccgccaggctccaggcaaggggctggagtgggtggcagttatatggtatgatgcaagtaataagttccatgcagacgccgtgaagggccgattcaccatctccagagacaattccaagaacacgctgtatctgcaaatgaacagcctgagagccgaggactcggctatgtacttctgtgcgagaggaaaagtggctggtatgcctgaagcttttgaaatctggggccaagggacaaaggtcaccgtctcttcagcctccaccaagggcccatcggtcttccccctggcaccctcctccaagagcacctctgggggcacagcggccctgggctgcctggtcaaggactacttccccgaaccggtgacggtgtcgtggaactcaggcgccctgaccagcggcgtgcacaccttcccggctgtcctacagtcctcaggactctactccctcagcagcgtggtgaccgtgccctccagcagcttgggcacccagacctacatctgcaacgtgaatcacaagcccagcaacaccaaggtggacaagaaagttgagcccaaatcttgtgacaaaactcacacatgcccaccgtgcccagcacctgaactcctggggggaccgtcagtcttcctcttccccccaaaacccaaggacaccctcatgatctcccggacccctgaggtcacatgcgtggtggtggacgtgagccacgaagaccctgaggtcaagttcaactggtacgtggacggcgtggaggtgcataatgccaagacaaagccgtgtgaggagcagtacggcagcacgtaccgttgtgtcagcgtcctcaccgtcctgcaccaggactggctgaatggcaaggagtacaagtgcaaggtctccaacaaagccctcccagcccccatcgagaaaaccatctccaaagccaaagggcagccccgagaaccacaggtgtacaccctgcccccatcccgggaggagatgaccaagaaccaggtcagcctgacctgcctggtcaaaggcttctatcccagcgacatcgccgtggagtgggagagcaatgggcagccggagaacaactacaagaccacgcctcccgtgctggactccgacggctccttcttcctctatagcaagctcaccgtggacaagagcaggtggcagcaggggaacgtcttctcatgctccgtgatgcatgaggctctgcacaaccactacacgcagaagagcctctccctgtctccgggtaaa

SEQ ID NO: 2186 - DNA, 1353 bp, synthetic construct; identical to SEQ ID NO: 2184
  misc_feature 1..1353: note = source = /note="Description of Artificial Sequence: Synthetic polynucleotide"
  source 1..1353: mol_type = other DNA

SEQ ID NO: 2187 - DNA, 1353 bp, synthetic construct
  misc_feature 1..1353: note = source = /note="Description of Artificial Sequence: Synthetic polynucleotide"
  source 1..1353: mol_type = other DNA
caggtgcagttggtggagtctgggggaggcgtggtccagcctgggaggtccctgagactctcctgtgcagcgtctggattcaccttcagtagctatggcatacactgggtccgccaggctccaggcaaggggctggagtgggtggcagttatatggtatgatgcaagtaataagttccatgcagacgccgtgaagggccgattcaccatctccagagacaattccaagaacacgctgtatctgcaaatgaacagcctgagagccgaggactcggctatgtacttctgtgcgagaggaaaagtggctggtatgcctgaagcttttgaaatctggggccaagggacattggtcaccgtctcttcagcctccaccaagggcccatcggtcttccccctggcaccctcctccaagagcacctctgggggcacagcggccctgggctgcctggtcaaggactacttccccgaaccggtgacggtgtcgtggaactcaggcgccctgaccagcggcgtgcacaccttcccggctgtcctacagtcctcaggactctactccctcagcagcgtggtgaccgtgccctccagcagcttgggcacccagacctacatctgcaacgtgaatcacaagcccagcaacaccaaggtggacaagaaagttgagcccaaatcttgtgacaaaactcacacatgcccaccgtgcccagcacctgaactcctggggggaccgtcagtcttcctcttccccccaaaacccaaggacaccctcatgatctcccggacccctgaggtcacatgcgtggtggtggacgtgagccacgaagaccctgaggtcaagttcaactggtacgtggacggcgtggaggtgcataatgccaagacaaagccgtgtgaggagcagtacggcagcacgtaccgttgtgtcagcgtcctcaccgtcctgcaccaggactggctgaatggcaaggagtacaagtgcaaggtctccaacaaagccctcccagcccccatcgagaaaaccatctccaaagccaaagggcagccccgagaaccacaggtgtacaccctgcccccatcccgggaggagatgaccaagaaccaggtcagcctgacctgcctggtcaaaggcttctatcccagcgacatcgccgtggagtgggagagcaatgggcagccggagaacaactacaagaccacgcctcccgtgctggactccgacggctccttcttcctctatagcaagctcaccgtggacaagagcaggtggcagcaggggaacgtcttctcatgctccgtgatgcatgaggctctgcacaaccactacacgcagaagagcctctccctgtctccgggtaaa

SEQ ID NO: 2188 - DNA, 1353 bp, synthetic construct
  misc_feature 1..1353: note = source = /note="Description of Artificial Sequence: Synthetic polynucleotide"
  source 1..1353: mol_type = other DNA
caggtgcagttggtggagtctgggggaggcgtggtccagcctgggaggtccctgagactctcctgtgcagcgtctggattcaccttcagtagctatggcatacactgggtccgccaggctccaggcaaggggctggagtgggtggcagttatatggtatgatgcaagtaataagttccatgcagactccgtgaagggccgattcaccatctccagagacaattccaagaacacgctgtatctgcaaatgaacagcctgagagccgaggactcggctatgtacttctgtgcgagaggaaaagtggctggtatgcctgaagcttttgaaatctggggccaagggacaaaggtcaccgtctcttcagcctccaccaagggcccatcggtcttccccctggcaccctcctccaagagcacctctgggggcacagcggccctgggctgcctggtcaaggactacttccccgaaccggtgacggtgtcgtggaactcaggcgccctgaccagcggcgtgcacaccttcccggctgtcctacagtcctcaggactctactccctcagcagcgtggtgaccgtgccctccagcagcttgggcacccagacctacatctgcaacgtgaatcacaagcccagcaacaccaaggtggacaagaaagttgagcccaaatcttgtgacaaaactcacacatgcccaccgtgcccagcacctgaactcctggggggaccgtcagtcttcctcttccccccaaaacccaaggacaccctcatgatctcccggacccctgaggtcacatgcgtggtggtggacgtgagccacgaagaccctgaggtcaagttcaactggtacgtggacggcgtggaggtgcataatgccaagacaaagccgtgtgaggagcagtacggcagcacgtaccgttgtgtcagcgtcctcaccgtcctgcaccaggactggctgaatggcaaggagtacaagtgcaaggtctccaacaaagccctcccagcccccatcgagaaaaccatctccaaagccaaagggcagccccgagaaccacaggtgtacaccctgcccccatcccgggaggagatgaccaagaaccaggtcagcctgacctgcctggtcaaaggcttctatcccagcgacatcgccgtggagtgggagagcaatgggcagccggagaacaactacaagaccacgcctcccgtgctggactccgacggctccttcttcctctatagcaagctcaccgtggacaagagcaggtggcagcaggggaacgtcttctcatgctccgtgatgcatgaggctctgcacaaccactacacgcagaagagcctctccctgtctccgggtaaa

SEQ ID NO: 2189 - DNA, 1353 bp, synthetic construct
  misc_feature 1..1353: note = source = /note="Description of Artificial Sequence: Synthetic polynucleotide"
  source 1..1353: mol_type = other DNA
caggtgcagttggtggagtctgggggaggcgtggtccagcctgggaggtccctgagactctcctgtgcagcgtctggattcaccttcagtagctatggcatacactgggtccgccaggctccaggcaaggggctggagtgggtggcagttatatggtatgatggaagtaataagttccatgcagacgccgtgaagggccgattcaccatctccagagacaattccaagaacacgctgtatctgcaaatgaacagcctgagagccgaggactcggctatgtacttctgtgcgagaggaaaagtggctggtatgcctgaagcttttgaaatctggggccaagggacaaaggtcaccgtctcttcagcctccaccaagggcccatcggtcttccccctggcaccctcctccaagagcacctctgggggcacagcggccctgggctgcctggtcaaggactacttccccgaaccggtgacggtgtcgtggaactcaggcgccctgaccagcggcgtgcacaccttcccggctgtcctacagtcctcaggactctactccctcagcagcgtggtgaccgtgccctccagcagcttgggcacccagacctacatctgcaacgtgaatcacaagcccagcaacaccaaggtggacaagaaagttgagcccaaatcttgtgacaaaactcacacatgcccaccgtgcccagcacctgaactcctggggggaccgtcagtcttcctcttccccccaaaacccaaggacaccctcatgatctcccggacccctgaggtcacatgcgtggtggtggacgtgagccacgaagaccctgaggtcaagttcaactggtacgtggacggcgtggaggtgcataatgccaagacaaagccgtgtgaggagcagtacggcagcacgtaccgttgtgtcagcgtcctcaccgtcctgcaccaggactggctgaatggcaaggagtacaagtgcaaggtctccaacaaagccctcccagcccccatcgagaaaaccatctccaaagccaaagggcagccccgagaaccacaggtgtacaccctgcccccatcccgggaggagatgaccaagaaccaggtcagcctgacctgcctggtcaaaggcttctatcccagcgacatcgccgtggagtgggagagcaatgggcagccggagaacaactacaagaccacgcctcccgtgctggactccgacggctccttcttcctctatagcaagctcaccgtggacaagagcaggtggcagcaggggaacgtcttctcatgctccgtgatgcatgaggctctgcacaaccactacacgcagaagagcctctccctgtctccgggtaaa

SEQ ID NO: 2190 - DNA, 1377 bp, synthetic construct
  misc_feature 1..1377: note = source = /note="Description of Artificial Sequence: Synthetic polynucleotide"
  source 1..1377: mol_type = other DNA
caaatgcagctggtgcagtctggggctgaggtgaagaagcctggggcctcagtgaaggtctcctgcaaggcttctggatacaccttcaccagttatgatatcaactgggtgcgacaggccactggacaagggcttgagtggatgggatggatgaaccctaacagtggtggcacaggctatgcacagaagttccagggcagagtcaccatgaccagggacacctccataagcacagcctacatggagctgagcagcctgagatctcaggacacggccgtgtattactgtgcgagagggggtgattacgtttgggggagttatcgtccctactactactactacggtatggacgtctggggccaagggaccacggtcaccgtctcctcagcctccaccaagggcccatcggtcttccccctggcaccctcctccaagagcacctctgggggcacagcggccctgggctgcctggtcaaggactacttccccgaaccggtgacggtgtcgtggaactcaggcgccctgaccagcggcgtgcacaccttcccggctgtcctacagtcctcaggactctactccctcagcagcgtggtgaccgtgccctccagcagcttgggcacccagacctacatctgcaacgtgaatcacaagcccagcaacaccaaggtggacaagaaagttgagcccaaatcttgtgacaaaactcacacatgcccaccgtgcccagcacctgaactcctggggggaccgtcagtcttcctcttccccccaaaacccaaggacaccctcatgatctcccggacccctgaggtcacatgcgtggtggtggacgtgagccacgaagaccctgaggtcaagttcaactggtacgtggacggcgtggaggtgcataatgccaagacaaagccgtgtgaggagcagtacggcagcacgtaccgttgtgtcagcgtcctcaccgtcctgcaccaggactggctgaatggcaaggagtacaagtgcaaggtctccaacaaagccctcccagcccccatcgagaaaaccatctccaaagccaaagggcagccccgagaaccacaggtgtacaccctgcccccatcccgggaggagatgaccaagaaccaggtcagcctgacctgcctggtcaaaggcttctatcccagcgacatcgccgtggagtgggagagcaatgggcagccggagaacaactacaagaccacgcctcccgtgctggactccgacggctccttcttcctctatagcaagctcaccgtggacaagagcaggtggcagcaggggaacgtcttctcatgctccgtgatgcatgaggctctgcacaaccactacacgcagaagagcctctccctgtctccgggtaaa

SEQ ID NO: 2191 - DNA, 1377 bp, synthetic construct; identical to SEQ ID NO: 2183
  misc_feature 1..1377: note = source = /note="Description of Artificial Sequence: Synthetic polynucleotide"
  source 1..1377: mol_type = other DNA

SEQ ID NO: 2192 - DNA, 1377 bp, synthetic construct; identical to SEQ ID NO: 2190
  misc_feature 1..1377: note = source = /note="Description of Artificial Sequence: Synthetic polynucleotide"
  source 1..1377: mol_type = other DNA

SEQ ID NO: 2193 - DNA, 1377 bp, synthetic construct
  misc_feature 1..1377: note = source = /note="Description of Artificial Sequence: Synthetic polynucleotide"
  source 1..1377: mol_type = other DNA
caaatgcagctggtgcagtctggggctgaggtgaagaagcctggggcctcagtgaaggtctcctgcaaggcttctggatacaccttcaccagttatgatatcaactgggtgcgacaggcccctggacaagggcttgagtggatgggatggatgaaccctaacagtggtggcacaggctatgcacagaagttccagggcagagtcaccatgaccagggacacctccataagcacagcctacatggagctgagcagcctgagatctgacgacacggccgtgtattactgtgcgagagggggtgattacgtttgggggagttatcgtccctactactactactacggtatggacgtctggggccaagggaccacggtcaccgtctcctcagcctccaccaagggcccatcggtcttccccctggcaccctcctccaagagcacctctgggggcacagcggccctgggctgcctggtcaaggactacttccccgaaccggtgacggtgtcgtggaactcaggcgccctgaccagcggcgtgcacaccttcccggctgtcctacagtcctcaggactctactccctcagcagcgtggtgaccgtgccctccagcagcttgggcacccagacctacatctgcaacgtgaatcacaagcccagcaacaccaaggtggacaagaaagttgagcccaaatcttgtgacaaaactcacacatgcccaccgtgcccagcacctgaactcctggggggaccgtcagtcttcctcttccccccaaaacccaaggacaccctcatgatctcccggacccctgaggtcacatgcgtggtggtggacgtgagccacgaagaccctgaggtcaagttcaactggtacgtggacggcgtggaggtgcataatgccaagacaaagccgtgtgaggagcagtacggcagcacgtaccgttgtgtcagcgtcctcaccgtcctgcaccaggactggctgaatggcaaggagtacaagtgcaaggtctccaacaaagccctcccagcccccatcgagaaaaccatctccaaagccaaagggcagccccgagaaccacaggtgtacaccctgcccccatcccgggaggagatgaccaagaaccaggtcagcctgacctgcctggtcaaaggcttctatcccagcgacatcgccgtggagtgggagagcaatgggcagccggagaacaactacaagaccacgcctcccgtgctggactccgacggctccttcttcctctatagcaagctcaccgtggacaagagcaggtggcagcaggggaacgtcttctcatgctccgtgatgcatgaggctctgcacaaccactacacgcagaagagcctctccctgtctccgggtaaa

SEQ ID NO: 2194 - DNA, 1377 bp, synthetic construct; identical to SEQ ID NO: 2190
  misc_feature 1..1377: note = source = /note="Description of Artificial Sequence: Synthetic polynucleotide"
  source 1..1377: mol_type = other DNA

SEQ ID NO: 2195 - DNA, 1377 bp, synthetic construct
  misc_feature 1..1377: note = source = /note="Description of Artificial Sequence: Synthetic polynucleotide"
  source 1..1377: mol_type = other DNA
caaatgcagctggtgcagtctggggctgaggtgaagaagcctggggcctcagtgaaggtctcctgcaaggcttctggatacaccttcaccagttatgatatcaactgggtgcgacaggcccctggacaagggcttgagtggatgggatggatgaaccctaacagtggtaacacaggctatgcacagaagttccagggcagagtcaccatgaccagggacacctccataagcacagcctacatggagctgagcagcctgagatctgacgacacggccgtgtattactgtgcgagagggggtgattacgtttgggggagttatcgtccctactactactactacggtatggacgtctggggccaagggaccacggtcaccgtctcctcagcctccaccaagggcccatcggtcttccccctggcaccctcctccaagagcacctctgggggcacagcggccctgggctgcctggtcaaggactacttccccgaaccggtgacggtgtcgtggaactcaggcgccctgaccagcggcgtgcacaccttcccggctgtcctacagtcctcaggactctactccctcagcagcgtggtgaccgtgccctccagcagcttgggcacccagacctacatctgcaacgtgaatcacaagcccagcaacaccaaggtggacaagaaagttgagcccaaatcttgtgacaaaactcacacatgcccaccgtgcccagcacctgaactcctggggggaccgtcagtcttcctcttccccccaaaacccaaggacaccctcatgatctcccggacccctgaggtcacatgcgtggtggtggacgtgagccacgaagaccctgaggtcaagttcaactggtacgtggacggcgtggaggtgcataatgccaagacaaagccgtgtgaggagcagtacggcagcacgtaccgttgtgtcagcgtcctcaccgtcctgcaccaggactggctgaatggcaaggagtacaagtgcaaggtctccaacaaagccctcccagcccccatcgagaaaaccatctccaaagccaaagggcagccccgagaaccacaggtgtacaccctgcccccatcccgggaggagatgaccaagaaccaggtcagcctgacctgcctggtcaaaggcttctatcccagcgacatcgccgtggagtgggagagcaatgggcagccggagaacaactacaagaccacgcctcccgtgctggactccgacggctccttcttcctctatagcaagctcaccgtggacaagagcaggtggcagcaggggaacgtcttctcatgctccgtgatgcatgaggctctgcacaaccactacacgcagaagagcctctccctgtctccgggtaaa

SEQ ID NO: 2196 - DNA, 1377 bp, synthetic construct
  misc_feature 1..1377: note = source = /note="Description of Artificial Sequence: Synthetic polynucleotide"
  source 1..1377: mol_type = other DNA
caaatgcagctggtgcagtctggggctgaggtgaagaagcctggggcctcagtgaaggtctcctgcaaggcttctggatacaccttcaccagttatgatatcaactgggtgcgacaggccactggacaagggcttgagtggatgggatggatgaaccctaacagtggtggcacaggctatgcacagaagttccagggcagagtcaccatgaccagggacacctccataagcacagcctacatggagctgagcagcctgagatctcaggacacggccgtgtattactgtgcgagagggggtgattacgttttcgggagttatcgtccctactactactactacggtatggacgtctggggccaagggaccacggtcaccgtctcctcagcctccaccaagggcccatcggtcttccccctggcaccctcctccaagagcacctctgggggcacagcggccctgggctgcctggtcaaggactacttccccgaaccggtgacggtgtcgtggaactcaggcgccctgaccagcggcgtgcacaccttcccggctgtcctacagtcctcaggactctactccctcagcagcgtggtgaccgtgccctccagcagcttgggcacccagacctacatctgcaacgtgaatcacaagcccagcaacaccaaggtggacaagaaagttgagcccaaatcttgtgacaaaactcacacatgcccaccgtgcccagcacctgaactcctggggggaccgtcagtcttcctcttccccccaaaacccaaggacaccctcatgatctcccggacccctgaggtcacatgcgtggtggtggacgtgagccacgaagaccctgaggtcaagttcaactggtacgtggacggcgtggaggtgcataatgccaagacaaagccgtgtgaggagcagtacggcagcacgtaccgttgtgtcagcgtcctcaccgtcctgcaccaggactggctgaatggcaaggagtacaagtgcaaggtctccaacaaagccctcccagcccccatcgagaaaaccatctccaaagccaaagggcagccccgagaaccacaggtgtacaccctgcccccatcccgggaggagatgaccaagaaccaggtcagcctgacctgcctggtcaaaggcttctatcccagcgacatcgccgtggagtgggagagcaatgggcagccggagaacaactacaagaccacgcctcccgtgctggactccgacggctccttcttcctctatagcaagctcaccgtggacaagagcaggtggcagcaggggaacgtcttctcatgctccgtgatgcatgaggctctgcacaaccactacacgcagaagagcctctccctgtctccgggtaaa

SEQ ID NO: 2197 - DNA, 1377 bp, synthetic construct
  misc_feature 1..1377: note = source = /note="Description of Artificial Sequence: Synthetic polynucleotide"
  source 1..1377: mol_type = other DNA
caaatgcagctggtgcagtctggggctgaggtgaagaagcctggggcctcagtgaaggtctcctgcaaggcttctggatacaccttcaccagttatgatatcaactgggtgcgacaggcccctggacaagggcttgagtggatgggatggatgaaccctaacagtggtggcacaggctatgcacagaagttccagggcagagtcaccatgaccagggacacctccataagcacagcctacatggagctgagcagcctgagatctgacgacacggccgtgtattactgtgcgagagggggtgattacgttttcgggagttatcgtccctactactactactacggtatggacgtctggggccaagggaccacggtcaccgtctcctcagcctccaccaagggcccatcggtcttccccctggcaccctcctccaagagcacctctgggggcacagcggccctgggctgcctggtcaaggactacttccccgaaccggtgacggtgtcgtggaactcaggcgccctgaccagcggcgtgcacaccttcccggctgtcctacagtcctcaggactctactccctcagcagcgtggtgaccgtgccctccagcagcttgggcacccagacctacatctgcaacgtgaatcacaagcccagcaacaccaaggtggacaagaaagttgagcccaaatcttgtgacaaaactcacacatgcccaccgtgcccagcacctgaactcctggggggaccgtcagtcttcctcttccccccaaaacccaaggacaccctcatgatctcccggacccctgaggtcacatgcgtggtggtggacgtgagccacgaagaccctgaggtcaagttcaactggtacgtggacggcgtggaggtgcataatgccaagacaaagccgtgtgaggagcagtacggcagcacgtaccgttgtgtcagcgtcctcaccgtcctgcaccaggactggctgaatggcaaggagtacaagtgcaaggtctccaacaaagccctcccagcccccatcgagaaaaccatctccaaagccaaagggcagccccgagaaccacaggtgtacaccctgcccccatcccgggaggagatgaccaagaaccaggtcagcctgacctgcctggtcaaaggcttctatcccagcgacatcgccgtggagtgggagagcaatgggcagccggagaacaactacaagaccacgcctcccgtgctggactccgacggctccttcttcctctatagcaagctcaccgtggacaagagcaggtggcagcaggggaacgtcttctcatgctccgtgatgcatgaggctctgcacaaccactacacgcagaagagcctctccctgtctccgggtaaa

SEQ ID NO: 2198 - DNA, 1353 bp, synthetic construct; identical to SEQ ID NO: 2187
  misc_feature 1..1353: note = source = /note="Description of Artificial Sequence: Synthetic polynucleotide"
  source 1..1353: mol_type = other DNA

SEQ ID NO: 2199 - DNA, 39 bp, synthetic construct
  misc_feature 1..39: note = source = /note="Description of Artificial Sequence: Synthetic oligonucleotide"
  source 1..39: mol_type = other DNA
tctggaagtagctccaacatcggaagtaatactgtaaac

SEQ ID NO: 2200 - DNA, 33 bp, synthetic construct
  misc_feature 1..33: note = source = /note="Description of Artificial Sequence: Synthetic oligonucleotide"
  source 1..33: mol_type = other DNA
cgggcaagtcaggacattagagattatttaggc

SEQ ID NO: 2201 - DNA, 33 bp, synthetic construct; identical to SEQ ID NO: 2200
  misc_feature 1..33: note = source = /note="Description of Artificial Sequence: Synthetic oligonucleotide"
  source 1..33: mol_type = other DNA

SEQ ID NO: 2202 - DNA, 33 bp, synthetic construct
  misc_feature 1..33: note = source = /note="Description of Artificial Sequence: Synthetic oligonucleotide"
  source 1..33: mol_type = other DNA
caggcgagtcaggacattagcaactatttaaat

SEQ ID NO: 2203 - DNA, 51 bp, synthetic construct
  misc_feature 1..51: note = source = /note="Description of Artificial Sequence: Synthetic oligonucleotide"
  source 1..51: mol_type = other DNA
aagtccagccagagtgttttatccagctccaacaataagaactacatagct

SEQ ID NO: 2204 - DNA, 51 bp, synthetic construct; identical to SEQ ID NO: 2203
  misc_feature 1..51: note = source = /note="Description of Artificial Sequence: Synthetic oligonucleotide"
  source 1..51: mol_type = other DNA

SEQ ID NO: 2205 - DNA, 51 bp, synthetic construct
  misc_feature 1..51: note = source = /note="Description of Artificial Sequence: Synthetic oligonucleotide"
  source 1..51: mol_type = other DNA
aagtccagccagagtgttttatccagctccaacaataagaactacttagct

SEQ ID NO: 2206 - DNA, 51 bp, synthetic construct; identical to SEQ ID NO: 2205
  misc_feature 1..51: note = source = /note="Description of Artificial Sequence: Synthetic oligonucleotide"
  source 1..51: mol_type = other DNA

SEQ ID NO: 2207 - DNA, 36 bp, synthetic construct
  misc_feature 1..36: note = source = /note="Description of Artificial Sequence: Synthetic oligonucleotide"
  source 1..36: mol_type = other DNA
agggccagtcagagtattagttacagttacttagcc

SEQ ID NO: 2208 - DNA, 33 bp, synthetic construct
  misc_feature 1..33: note = source = /note="Description of Artificial Sequence: Synthetic oligonucleotide"
  source 1..33: mol_type = other DNA
agggccagtcagagtgttagcagcaacttagcc

SEQ ID NO: 2209 - DNA, 33 bp, synthetic construct
  misc_feature 1..33: note = source = /note="Description of Artificial Sequence: Synthetic oligonucleotide"
  source 1..33: mol_type = other DNA
cgggcaagtcagggcattagaaatgagttaggc

SEQ ID NO: 2210 - DNA, 33 bp, synthetic construct
  misc_feature 1..33: note = source = /note="Description of Artificial Sequence: Synthetic oligonucleotide"
  source 1..33: mol_type = other DNA
caggcgagtcaggacattaccaactatttaaat

SEQ ID NO: 2211 - DNA, 33 bp, synthetic construct
  misc_feature 1..33: note = source = /note="Description of Artificial Sequence: Synthetic oligonucleotide"
  source 1..33: mol_type = other DNA
cgggcgagtcagggtcttatcatctggttagcc

SEQ ID NO: 2212 - DNA, 33 bp, synthetic construct; identical to SEQ ID NO: 2211
  misc_feature 1..33: note = source = /note="Description of Artificial Sequence: Synthetic oligonucleotide"
  source 1..33: mol_type = other DNA

SEQ ID NO: 2213 - DNA, 33 bp, synthetic construct; identical to SEQ ID NO: 2209
  misc_feature 1..33: note = source = /note="Description of Artificial Sequence: Synthetic oligonucleotide"
  source 1..33: mol_type = other DNA

SEQ ID NO: 2214 - DNA, 33 bp, synthetic construct; identical to SEQ ID NO: 2209
  misc_feature 1..33: note = source = /note="Description of Artificial Sequence: Synthetic oligonucleotide"
  source 1..33: mol_type = other DNA

SEQ ID NO: 2215 - DNA, 33 bp, synthetic construct; identical to SEQ ID NO: 2209
  misc_feature 1..33: note = source = /note="Description of Artificial Sequence: Synthetic oligonucleotide"
  source 1..33: mol_type = other DNA

SEQ ID NO: 2216 - DNA, 33 bp, synthetic construct; identical to SEQ ID NO: 2209
  misc_feature 1..33: note = source = /note="Description of Artificial Sequence: Synthetic oligonucleotide"
  source 1..33: mol_type = other DNA

SEQ ID NO: 2217 - DNA, 33 bp, synthetic construct; identical to SEQ ID NO: 2209
  misc_feature 1..33: note = source = /note="Description of Artificial Sequence: Synthetic oligonucleotide"
  source 1..33: mol_type = other DNA

SEQ ID NO: 2218 - DNA, 33 bp, synthetic construct; identical to SEQ ID NO: 2209
  misc_feature 1..33: note = source = /note="Description of Artificial Sequence: Synthetic oligonucleotide"
  source 1..33: mol_type = other DNA

SEQ ID NO: 2219 - DNA, 33 bp, synthetic construct; identical to SEQ ID NO: 2200
  misc_feature 1..33: note = source = /note="Description of Artificial Sequence: Synthetic oligonucleotide"
  source 1..33: mol_type = other DNA

SEQ ID NO: 2220 - DNA, 33 bp, synthetic construct; identical to SEQ ID NO: 2200
  misc_feature 1..33: note = source = /note="Description of Artificial Sequence: Synthetic oligonucleotide"
  source 1..33: mol_type = other DNA

SEQ ID NO: 2221 - DNA, 33 bp, synthetic construct; identical to SEQ ID NO: 2200
  misc_feature 1..33: note = source = /note="Description of Artificial Sequence: Synthetic oligonucleotide"
  source 1..33: mol_type = other DNA

SEQ ID NO: 2222 - DNA, 33 bp, synthetic construct; identical to SEQ ID NO: 2200
  misc_feature 1..33: note = source = /note="Description of Artificial Sequence: Synthetic oligonucleotide"
  source 1..33: mol_type = other DNA

SEQ ID NO: 2223 - DNA, 33 bp, synthetic construct; identical to SEQ ID NO: 2200
  misc_feature 1..33: note = source = /note="Description of Artificial Sequence: Synthetic oligonucleotide"
  source 1..33: mol_type = other DNA

SEQ ID NO: 2224 - DNA, 33 bp, synthetic construct; identical to SEQ ID NO: 2200
  misc_feature 1..33: note = source = /note="Description of Artificial Sequence: Synthetic oligonucleotide"
  source 1..33: mol_type = other DNA

SEQ ID NO: 2225 - DNA, 33 bp, synthetic construct; identical to SEQ ID NO: 2200
  misc_feature 1..33: note = source = /note="Description of Artificial Sequence: Synthetic oligonucleotide"
  source 1..33: mol_type = other DNA

SEQ ID NO: 2226 - DNA, 33 bp, synthetic construct
  misc_feature 1..33: note = source = /note="Description of Artificial Sequence: Synthetic oligonucleotide"
  source 1..33: mol_type = other DNA
cgggcaagtcaggaccttagaaattatttaggc

SEQ ID NO: 2227 - DNA, 33 bp, synthetic construct; identical to SEQ ID NO: 2226
  misc_feature 1..33: note = source = /note="Description of Artificial Sequence: Synthetic oligonucleotide"
  source 1..33: mol_type = other DNA

SEQ ID NO: 2228 - DNA, 33 bp, synthetic construct; identical to SEQ ID NO: 2226
  misc_feature 1..33: note = source = /note="Description of Artificial Sequence: Synthetic oligonucleotide"
  source 1..33: mol_type = other DNA

SEQ ID NO: 2229 - DNA, 33 bp, synthetic construct; identical to SEQ ID NO: 2226
  misc_feature 1..33: note = source = /note="Description of Artificial Sequence: Synthetic oligonucleotide"
  source 1..33: mol_type = other DNA

SEQ ID NO: 2230 - DNA, 33 bp, synthetic construct; identical to SEQ ID NO: 2226
  misc_feature 1..33: note = source = /note="Description of Artificial Sequence: Synthetic oligonucleotide"
  source 1..33: mol_type = other DNA

SEQ ID NO: 2231 - DNA, 33 bp, synthetic construct; identical to SEQ ID NO: 2226
  misc_feature 1..33: note = source = /note="Description of Artificial Sequence: Synthetic oligonucleotide"
  source 1..33: mol_type = other DNA

SEQ ID NO: 2232 - DNA, 33 bp, synthetic construct; identical to SEQ ID NO: 2226
  misc_feature 1..33: note = source = /note="Description of Artificial Sequence: Synthetic oligonucleotide"
  source 1..33: mol_type = other DNA

SEQ ID NO: 2233 - DNA, 33 bp, synthetic construct; identical to SEQ ID NO: 2226
  misc_feature 1..33: note = source = /note="Description of Artificial Sequence: Synthetic oligonucleotide"
  source 1..33: mol_type = other DNA

SEQ ID NO: 2234 - DNA, 33 bp, synthetic construct; identical to SEQ ID NO: 2226
  misc_feature 1..33: note = source = /note="Description of Artificial Sequence: Synthetic oligonucleotide"
  source 1..33: mol_type = other DNA

SEQ ID NO: 2235 - DNA, 33 bp, synthetic construct; identical to SEQ ID NO: 2226
  misc_feature 1..33: note = source = /note="Description of Artificial Sequence: Synthetic oligonucleotide"
  source 1..33: mol_type = other DNA

SEQ ID NO: 2236 - DNA, 33 bp, synthetic construct; identical to SEQ ID NO: 2226
  misc_feature 1..33: note = source = /note="Description of Artificial Sequence: Synthetic oligonucleotide"
  source 1..33: mol_type = other DNA

SEQ ID NO: 2237 - DNA, 33 bp, synthetic construct; identical to SEQ ID NO: 2226
  misc_feature 1..33: note = source = /note="Description of Artificial Sequence: Synthetic oligonucleotide"
  source 1..33: mol_type = other DNA

SEQ ID NO: 2238 - DNA, 33 bp, synthetic construct; identical to SEQ ID NO: 2202
  misc_feature 1..33: note = source = /note="Description of Artificial Sequence: Synthetic oligonucleotide"
  source 1..33: mol_type = other DNA

SEQ ID NO: 2239 - DNA, 33 bp, synthetic construct; identical to SEQ ID NO: 2202
  misc_feature 1..33: note = source = /note="Description of Artificial Sequence: Synthetic oligonucleotide"
  source 1..33: mol_type = other DNA

SEQ ID NO: 2240 - DNA, 33 bp, synthetic construct; identical to SEQ ID NO: 2202
  misc_feature 1..33: note = source = /note="Description of Artificial Sequence: Synthetic oligonucleotide"
  source 1..33: mol_type = other DNA

SEQ ID NO: 2241 - DNA, 33 bp, synthetic construct; identical to SEQ ID NO: 2202
  misc_feature 1..33: note = source = /note="Description of Artificial Sequence: Synthetic oligonucleotide"
  source 1..33: mol_type = other DNA

SEQ ID NO: 2242 - DNA, 33 bp, synthetic construct; identical to SEQ ID NO: 2202
  misc_feature 1..33: note = source = /note="Description of Artificial Sequence: Synthetic oligonucleotide"
  source 1..33: mol_type = other DNA

SEQ ID NO: 2243 - DNA, 33 bp, synthetic construct; identical to SEQ ID NO: 2202
  misc_feature 1..33: note = source = /note="Description of Artificial Sequence: Synthetic oligonucleotide"
  source 1..33: mol_type = other DNA

SEQ ID NO: 2244 - DNA, 33 bp, synthetic construct; identical to SEQ ID NO: 2202
  misc_feature 1..33: note = source = /note="Description of Artificial Sequence: Synthetic oligonucleotide"
  source 1..33: mol_type = other DNA

SEQ ID NO: 2245 - DNA, 33 bp, synthetic construct; identical to SEQ ID NO: 2202
  misc_feature 1..33: note = source = /note="Description of Artificial Sequence: Synthetic oligonucleotide"
  source 1..33: mol_type = other DNA

SEQ ID NO: 2246 - DNA, 33 bp, synthetic construct; identical to SEQ ID NO: 2202
  misc_feature 1..33: note = source = /note="Description of Artificial Sequence: Synthetic oligonucleotide"
  source 1..33: mol_type = other DNA

SEQ ID NO: 2247 - DNA, 33 bp, synthetic construct; identical to SEQ ID NO: 2200
  misc_feature 1..33: note = source = /note="Description of Artificial Sequence: Synthetic oligonucleotide"
  source 1..33: mol_type = other DNA

SEQ ID NO: 2248 - DNA, 33 bp, synthetic construct; identical to SEQ ID NO: 2200
  misc_feature 1..33: note = source = /note="Description of Artificial Sequence: Synthetic oligonucleotide"
  source 1..33: mol_type = other DNA

SEQ ID NO: 2249 - DNA, 33 bp, synthetic construct; identical to SEQ ID NO: 2200
  misc_feature 1..33: note = source = /note="Description of Artificial Sequence: Synthetic oligonucleotide"
  source 1..33: mol_type = other DNA

SEQ ID NO: 2250 - DNA, 33 bp, synthetic construct; identical to SEQ ID NO: 2200
  misc_feature 1..33: note = source = /note="Description of Artificial Sequence: Synthetic oligonucleotide"
  source 1..33: mol_type = other DNA

SEQ ID NO: 2251 - DNA, 33 bp, synthetic construct; identical to SEQ ID NO: 2200
  misc_feature 1..33: note = source = /note="Description of Artificial Sequence: Synthetic oligonucleotide"
  source 1..33: mol_type = other DNA

SEQ ID NO: 2252 - DNA, 33 bp, synthetic construct; identical to SEQ ID NO: 2200
  misc_feature 1..33: note = source = /note="Description of Artificial Sequence: Synthetic oligonucleotide"
  source 1..33: mol_type = other DNA

SEQ ID NO: 2253 - DNA, 33 bp, synthetic construct; identical to SEQ ID NO: 2200
  misc_feature 1..33: note = source = /note="Description of Artificial Sequence: Synthetic oligonucleotide"
  source 1..33: mol_type = other DNA

SEQ ID NO: 2254 - DNA, 33 bp, synthetic construct; identical to SEQ ID NO: 2210
  misc_feature 1..33: note = source = /note="Description of Artificial Sequence: Synthetic oligonucleotide"
  source 1..33: mol_type = other DNA

SEQ ID NO: 2255 - DNA, 33 bp, synthetic construct; identical to SEQ ID NO: 2210
  misc_feature 1..33: note = source = /note="Description of Artificial Sequence: Synthetic oligonucleotide"
  source 1..33: mol_type = other DNA

SEQ ID NO: 2256 - DNA, 33 bp, synthetic construct; identical to SEQ ID NO: 2210
  misc_feature 1..33: note = source = /note="Description of Artificial Sequence: Synthetic oligonucleotide"
  source 1..33: mol_type = other DNA

SEQ ID NO: 2257 - DNA, 33 bp, synthetic construct; identical to SEQ ID NO: 2210
  misc_feature 1..33: note = source = /note="Description of Artificial Sequence: Synthetic oligonucleotide"
  source 1..33: mol_type = other DNA

SEQ ID NO: 2258 - DNA, 33 bp, synthetic construct; identical to SEQ ID NO: 2210
  misc_feature 1..33: note = source = /note="Description of Artificial Sequence: Synthetic oligonucleotide"
  source 1..33: mol_type = other DNA

SEQ ID NO: 2259 - DNA, 33 bp, synthetic construct; identical to SEQ ID NO: 2210
  misc_feature 1..33: note = source = /note="Description of Artificial Sequence: Synthetic oligonucleotide"
  source 1..33: mol_type = other DNA

SEQ ID NO: 2260 - DNA, 33 bp, synthetic construct; identical to SEQ ID NO: 2210
  misc_feature 1..33: note = source = /note="Description of Artificial Sequence: Synthetic oligonucleotide"
  source 1..33: mol_type = other DNA

SEQ ID NO: 2261 - DNA, 33 bp, synthetic construct; identical to SEQ ID NO: 2210
  misc_feature 1..33: note = source = /note="Description of Artificial Sequence: Synthetic oligonucleotide"
  source 1..33: mol_type = other DNA

SEQ ID NO: 2262 - DNA, 33 bp, synthetic construct; identical to SEQ ID NO: 2210
  misc_feature 1..33: note = source = /note="Description of Artificial Sequence: Synthetic oligonucleotide"
  source 1..33: mol_type = other DNA

SEQ ID NO: 2263 - DNA, 33 bp, synthetic construct; identical to SEQ ID NO: 2210
  misc_feature 1..33: note = source = /note="Description of Artificial Sequence: Synthetic oligonucleotide"
  source 1..33: mol_type = other DNA

SEQ ID NO: 2264 - DNA, 33 bp, synthetic construct; identical to SEQ ID NO: 2210
  misc_feature 1..33: note = source = /note="Description of Artificial Sequence: Synthetic oligonucleotide"
  source 1..33: mol_type = other DNA

SEQ ID NO: 2265 - DNA, 36 bp, synthetic construct
  misc_feature 1..36: note = source = /note="Description of Artificial Sequence: Synthetic oligonucleotide"
  source 1..36: mol_type = other DNA
agggccagtcagatttttaccagcacctacttagcc

SEQ ID NO: 2266 - DNA, 36 bp, synthetic construct; identical to SEQ ID NO: 2265
  misc_feature 1..36: note = source = /note="Description of Artificial Sequence: Synthetic oligonucleotide"
  source 1..36: mol_type = other DNA

SEQ ID NO: 2267 - DNA, 36 bp, synthetic construct; identical to SEQ ID NO: 2265
  misc_feature 1..36: note = source = /note="Description of Artificial Sequence: Synthetic oligonucleotide"
  source 1..36: mol_type = other DNA

SEQ ID NO: 2268 - DNA, 36 bp, synthetic construct; identical to SEQ ID NO: 2265
  misc_feature 1..36: note = source = /note="Description of Artificial Sequence: Synthetic oligonucleotide"
  source 1..36: mol_type = other DNA

SEQ ID NO: 2269 - DNA, 33 bp, synthetic construct; identical to SEQ ID NO: 2208
  misc_feature 1..33: note = source = /note="Description of Artificial Sequence: Synthetic oligonucleotide"
  source 1..33: mol_type = other DNA

SEQ ID NO: 2270 - DNA, 33 bp, synthetic construct; identical to SEQ ID NO: 2208
  misc_feature 1..33: note = source = /note="Description of Artificial Sequence: Synthetic oligonucleotide"
  source 1..33: mol_type = other DNA

SEQ ID NO: 2271 - DNA, 33 bp, synthetic construct; identical to SEQ ID NO: 2208
  misc_feature 1..33: note = source = /note="Description of Artificial Sequence: Synthetic oligonucleotide"
  source 1..33: mol_type = other DNA

SEQ ID NO: 2272 - DNA, 33 bp, synthetic construct; identical to SEQ ID NO: 2208
  misc_feature 1..33: note = source = /note="Description of Artificial Sequence: Synthetic oligonucleotide"
  source 1..33: mol_type = other DNA

SEQ ID NO: 2273 - DNA, 33 bp, synthetic construct; identical to SEQ ID NO: 2208
  misc_feature 1..33: note = source = /note="Description of Artificial Sequence: Synthetic oligonucleotide"
  source 1..33: mol_type = other DNA

SEQ ID NO: 2274 - DNA, 33 bp, synthetic construct; identical to SEQ ID NO: 2208
  misc_feature 1..33: note = source = /note="Description of Artificial Sequence: Synthetic oligonucleotide"
  source 1..33: mol_type = other DNA

SEQ ID NO: 2275 - DNA, 33 bp, synthetic construct; identical to SEQ ID NO: 2208
  misc_feature 1..33: note = source = /note="Description of Artificial Sequence: Synthetic oligonucleotide"
  source 1..33: mol_type = other DNA

SEQ ID NO: 2276 - DNA, 33 bp, synthetic construct; identical to SEQ ID NO: 2208
  misc_feature 1..33: note = source = /note="Description of Artificial Sequence: Synthetic oligonucleotide"
  source 1..33: mol_type = other DNA

SEQ ID NO: 2277 - DNA, 36 bp, synthetic construct; identical to SEQ ID NO: 2207
  misc_feature 1..36: note = source = /note="Description of Artificial Sequence: Synthetic oligonucleotide"
  source 1..36: mol_type = other DNA

SEQ ID NO: 2278 - DNA, 36 bp, synthetic construct; identical to SEQ ID NO: 2207
  misc_feature 1..36: note = source = /note="Description of Artificial Sequence: Synthetic oligonucleotide"
  source 1..36: mol_type = other DNA

SEQ ID NO: 2279 - DNA, 36 bp, synthetic construct; identical to SEQ ID NO: 2207
  misc_feature 1..36: note = source = /note="Description of Artificial Sequence: Synthetic oligonucleotide"
  source 1..36: mol_type = other DNA

SEQ ID NO: 2280 - DNA, 36 bp, synthetic construct; identical to SEQ ID NO: 2207
  misc_feature 1..36: note = source = /note="Description of Artificial Sequence: Synthetic oligonucleotide"
  source 1..36: mol_type = other DNA

SEQ ID NO: 2281 - DNA, 36 bp, synthetic construct; identical to SEQ ID NO: 2207
  misc_feature 1..36: note = source = /note="Description of Artificial Sequence: Synthetic oligonucleotide"
  source 1..36: mol_type = other DNA

SEQ ID NO: 2282 - DNA, 36 bp, synthetic construct; identical to SEQ ID NO: 2207
  misc_feature 1..36: note = source = /note="Description of Artificial Sequence: Synthetic oligonucleotide"
  source 1..36: mol_type = other DNA

SEQ ID NO: 2283 - DNA, 36 bp, synthetic construct; identical to SEQ ID NO: 2207
  misc_feature 1..36: note = source = /note="Description of Artificial Sequence: Synthetic oligonucleotide"
  source 1..36: mol_type = other DNA

SEQ ID NO: 2284 - DNA, 51 bp, synthetic construct; identical to SEQ ID NO: 2203
  misc_feature 1..51: note = source = /note="Description of Artificial Sequence: Synthetic oligonucleotide"
  source 1..51: mol_type = other DNA

SEQ ID NO: 2285 - DNA, 51 bp, synthetic construct; identical to SEQ ID NO: 2203
  misc_feature 1..51: note = source = /note="Description of Artificial Sequence: Synthetic oligonucleotide"
  source 1..51: mol_type = other DNA

SEQ ID NO: 2286 - DNA, 51 bp, synthetic construct; identical to SEQ ID NO: 2203
  misc_feature 1..51: note = source = /note="Description of Artificial Sequence: Synthetic oligonucleotide"
  source 1..51: mol_type = other DNA

SEQ ID NO: 2287 - DNA, 51 bp, synthetic construct; identical to SEQ ID NO: 2203
  misc_feature 1..51: note = source = /note="Description of Artificial Sequence: Synthetic oligonucleotide"
  source 1..51: mol_type = other DNA

SEQ ID NO: 2288 - DNA, 51 bp, synthetic construct; identical to SEQ ID NO: 2203
  misc_feature 1..51: note = source = /note="Description of Artificial Sequence: Synthetic oligonucleotide"
  source 1..51: mol_type = other DNA

SEQ ID NO: 2289 - DNA, 51 bp, synthetic construct; identical to SEQ ID NO: 2203
  misc_feature 1..51: note = source = /note="Description of Artificial Sequence: Synthetic oligonucleotide"
  source 1..51: mol_type = other DNA

SEQ ID NO: 2290 - DNA, 51 bp, synthetic construct; identical to SEQ ID NO: 2203
  misc_feature 1..51: note = source = /note="Description of Artificial Sequence: Synthetic oligonucleotide"
  source 1..51: mol_type = other DNA

SEQ ID NO: 2291 - DNA, 51 bp, synthetic construct; identical to SEQ ID NO: 2203
  misc_feature 1..51: note = source = /note="Description of Artificial Sequence: Synthetic oligonucleotide"
  source 1..51: mol_type = other DNA

SEQ ID NO: 2292 - DNA, 51 bp, synthetic construct; identical to SEQ ID NO: 2203
  misc_feature 1..51: note = source = /note="Description of Artificial Sequence: Synthetic oligonucleotide"
  source 1..51: mol_type = other DNA

SEQ ID NO: 2293 - DNA, 51 bp, synthetic construct; identical to SEQ ID NO: 2203
  misc_feature 1..51: note = source = /note="Description of Artificial Sequence: Synthetic oligonucleotide"
  source 1..51: mol_type = other DNA

SEQ ID NO: 2294 - DNA, 51 bp, synthetic construct; identical to SEQ ID NO: 2203
  misc_feature 1..51: note = source = /note="Description of Artificial Sequence: Synthetic oligonucleotide"
  source 1..51: mol_type = other DNA

SEQ ID NO: 2295 - DNA, 51 bp, synthetic construct; identical to SEQ ID NO: 2205
  misc_feature 1..51: note = source = /note="Description of Artificial Sequence: Synthetic oligonucleotide"
  source 1..51: mol_type = other DNA

SEQ ID NO: 2296 - DNA, 51 bp, synthetic construct; identical to SEQ ID NO: 2205
  misc_feature 1..51: note = source = /note="Description of Artificial Sequence: Synthetic oligonucleotide"
  source 1..51: mol_type = other DNA

SEQ ID NO: 2297 - DNA, 51 bp, synthetic construct; identical to SEQ ID NO: 2205
  misc_feature 1..51: note = source = /note="Description of Artificial Sequence: Synthetic oligonucleotide"
  source 1..51: mol_type = other DNA

SEQ ID NO: 2298 - DNA, 51 bp, synthetic construct; identical to SEQ ID NO: 2205
  misc_feature 1..51: note = source = /note="Description of Artificial Sequence: Synthetic oligonucleotide"
  source 1..51: mol_type = other DNA

SEQ ID NO: 2299 - DNA, 51 bp, synthetic construct; identical to SEQ ID NO: 2205
  misc_feature 1..51: note = source = /note="Description of Artificial Sequence: Synthetic oligonucleotide"
  source 1..51: mol_type = other DNA

SEQ ID NO: 2300 - DNA, 51 bp, synthetic construct; identical to SEQ ID NO: 2205
  misc_feature 1..51: note = source = /note="Description of Artificial Sequence: Synthetic oligonucleotide"
  source 1..51: mol_type = other DNA

SEQ ID NO: 2301 - DNA, 51 bp, synthetic construct; identical to SEQ ID NO: 2205
  misc_feature 1..51: note = source = /note="Description of Artificial Sequence: Synthetic oligonucleotide"
  source 1..51: mol_type = other DNA

SEQ ID NO: 2302 - DNA, 51 bp, synthetic construct; identical to SEQ ID NO: 2205
  misc_feature 1..51: note = source = /note="Description of Artificial Sequence: Synthetic oligonucleotide"
  source 1..51: mol_type = other DNA

SEQ ID NO: 2303 - DNA, 51 bp, synthetic construct; identical to SEQ ID NO: 2205
  misc_feature 1..51: note = source = /note="Description of Artificial Sequence: Synthetic oligonucleotide"
  source 1..51: mol_type = other DNA

SEQ ID NO: 2304 - DNA, 51 bp, synthetic construct; identical to SEQ ID NO: 2203
  misc_feature 1..51: note = source = /note="Description of Artificial Sequence: Synthetic oligonucleotide"
  source 1..51: mol_type = other DNA

SEQ ID NO: 2305 - DNA, 51 bp, synthetic construct; identical to SEQ ID NO: 2203
  misc_feature 1..51: note = source = /note="Description of Artificial Sequence: Synthetic oligonucleotide"
  source 1..51: mol_type = other DNA

SEQ ID NO: 2306 - DNA, 51 bp, synthetic construct; identical to SEQ ID NO: 2203
  misc_feature 1..51: note = source = /note="Description of Artificial Sequence: Synthetic oligonucleotide"
  source 1..51: mol_type = other DNA

SEQ ID NO: 2307 - DNA, 51 bp, synthetic construct; identical to SEQ ID NO: 2203
  misc_feature 1..51: note = source = /note="Description of Artificial Sequence: Synthetic oligonucleotide"
  source 1..51: mol_type = other DNA

SEQ ID NO: 2308 - DNA, 51 bp, synthetic construct; identical to SEQ ID NO: 2203
  misc_feature 1..51: note = source = /note="Description of Artificial Sequence: Synthetic oligonucleotide"
  source 1..51: mol_type = other DNA

SEQ ID NO: 2309 - DNA, 51 bp, synthetic construct; identical to SEQ ID NO: 2205
  misc_feature 1..51: note = source = /note="Description of Artificial Sequence: Synthetic oligonucleotide"
  source 1..51: mol_type = other DNA

SEQ ID NO: 2310 - DNA, 51 bp, synthetic construct; identical to SEQ ID NO: 2205
  misc_feature 1..51: note = source = /note="Description of Artificial Sequence: Synthetic oligonucleotide"
  source 1..51: mol_type = other DNA

SEQ ID NO: 2311 - DNA, 51 bp, synthetic construct; identical to SEQ ID NO: 2205
  misc_feature 1..51: note = source = /note="Description of Artificial Sequence: Synthetic oligonucleotide"
  source 1..51: mol_type = other DNA

SEQ ID NO: 2312 - DNA, 51 bp, synthetic construct; identical to SEQ ID NO: 2205
  misc_feature 1..51: note = source = /note="Description of Artificial Sequence: Synthetic oligonucleotide"
  source 1..51: mol_type = other DNA

SEQ ID NO: 2313 - DNA, 51 bp, synthetic construct; identical to SEQ ID NO: 2205
  misc_feature 1..51: note = source = /note="Description of Artificial Sequence: Synthetic oligonucleotide"
  source 1..51: mol_type = other DNA

SEQ ID NO: 2314 - DNA, 51 bp, synthetic construct; identical to SEQ ID NO: 2205
  misc_feature 1..51: note = source = /note="Description of Artificial Sequence: Synthetic oligonucleotide"
  source 1..51: mol_type = other DNA

SEQ ID NO: 2315 - DNA, 51 bp, synthetic construct; identical to SEQ ID NO: 2205
  misc_feature 1..51: note = source = /note="Description of Artificial Sequence: Synthetic oligonucleotide"
  source 1..51: mol_type = other DNA

SEQ ID NO: 2316 - DNA, 51 bp, synthetic construct; identical to SEQ ID NO: 2205
  misc_feature 1..51: note = source = /note="Description of Artificial Sequence: Synthetic oligonucleotide"
  source 1..51: mol_type = other DNA

SEQ ID NO: 2317 - DNA, 51 bp, synthetic construct; identical to SEQ ID NO: 2205
  misc_feature 1..51: note = source = /note="Description of Artificial Sequence: Synthetic oligonucleotide"
  source 1..51: mol_type = other DNA

SEQ ID NO: 2318 - DNA, 51 bp, synthetic construct; identical to SEQ ID NO: 2205
  misc_feature 1..51: note = source = /note="Description of Artificial Sequence: Synthetic oligonucleotide"
  source 1..51: mol_type = other DNA

SEQ ID NO: 2319 - DNA, 51 bp, synthetic construct; identical to SEQ ID NO: 2205
  misc_feature 1..51: note = source = /note="Description of Artificial Sequence: Synthetic oligonucleotide"
  source 1..51: mol_type = other DNA

SEQ ID NO: 2320 - DNA, 51 bp, synthetic construct; identical to SEQ ID NO: 2205
  misc_feature 1..51: note = source = /note="Description of Artificial Sequence: Synthetic oligonucleotide"
  source 1..51: mol_type = other DNA

SEQ ID NO: 2321 - DNA, 51 bp, synthetic construct; identical to SEQ ID NO: 2205
  misc_feature 1..51: note = source = /note="Description of Artificial Sequence: Synthetic oligonucleotide"
  source 1..51: mol_type = other DNA

SEQ ID NO: 2322 - DNA, 39 bp, synthetic construct
  misc_feature 1..39: note = source = /note="Description of Artificial Sequence: Synthetic oligonucleotide"
  source 1..39: mol_type = other DNA
tctggaagtagctccaacatcggaagtcaaactgtaaac

SEQ ID NO: 2323 - DNA, 39 bp, synthetic construct; identical to SEQ ID NO: 2322
  misc_feature 1..39: note = source = /note="Description of Artificial Sequence: Synthetic oligonucleotide"
  source 1..39: mol_type = other DNA

SEQ ID NO: 2324 - DNA, 39 bp, synthetic construct
  misc_feature 1..39: note = source = /note="Description of Artificial Sequence: Synthetic oligonucleotide"
  source 1..39: mol_type = other DNA
tctggaagtagctccaacatcggaagtaattatgtaaac

SEQ ID NO: 2325 - DNA, 39 bp, synthetic construct; identical to SEQ ID NO: 2324
  misc_feature 1..39: note = source = /note="Description of Artificial Sequence: Synthetic oligonucleotide"
  source 1..39: mol_type = other DNA

SEQ ID NO: 2326 - DNA, 39 bp, synthetic construct; identical to SEQ ID NO: 2322
  misc_feature 1..39: note = source = /note="Description of Artificial Sequence: Synthetic oligonucleotide"
  source 1..39: mol_type = other DNA

SEQ ID NO: 2327 - DNA, 39 bp, synthetic construct; identical to SEQ ID NO: 2324
  misc_feature 1..39: note = source = /note="Description of Artificial Sequence: Synthetic oligonucleotide"
  source 1..39: mol_type = other DNA

SEQ ID NO: 2328 - DNA, 39 bp, synthetic construct; identical to SEQ ID NO: 2199
  misc_feature 1..39: note = source = /note="Description of Artificial Sequence: Synthetic oligonucleotide"
  source 1..39: mol_type = other DNA

SEQ ID NO: 2329 - DNA, 39 bp, synthetic construct; identical to SEQ ID NO: 2199
  misc_feature 1..39: note = source = /note="Description of Artificial Sequence: Synthetic oligonucleotide"
  source 1..39: mol_type = other DNA

SEQ ID NO: 2330 - DNA, 39 bp, synthetic construct; identical to SEQ ID NO: 2199
  misc_feature 1..39: note = source = /note="Description of Artificial Sequence: Synthetic oligonucleotide"
  source 1..39: mol_type = other DNA

SEQ ID NO: 2331 - DNA, 39 bp, synthetic construct; identical to SEQ ID NO: 2199
  misc_feature 1..39: note = source = /note="Description of Artificial Sequence: Synthetic oligonucleotide"
  source 1..39: mol_type = other DNA

SEQ ID NO: 2332 - DNA, 39 bp, synthetic construct; identical to SEQ ID NO: 2199
  misc_feature 1..39: note = source = /note="Description of Artificial Sequence: Synthetic oligonucleotide"
  source 1..39: mol_type = other DNA

SEQ ID NO: 2333 - DNA, 39 bp, synthetic construct; identical to SEQ ID NO: 2324
  misc_feature 1..39: note = source = /note="Description of Artificial Sequence: Synthetic oligonucleotide"
  source 1..39: mol_type = other DNA

SEQ ID NO: 2334 - DNA, 39 bp, synthetic construct; identical to SEQ ID NO: 2324
  misc_feature 1..39: note = source = /note="Description of Artificial Sequence: Synthetic oligonucleotide"
  source 1..39: mol_type = other DNA

SEQ ID NO: 2335 - DNA, 39 bp, synthetic construct; identical to SEQ ID NO: 2322
  misc_feature 1..39: note = source = /note="Description of Artificial Sequence: Synthetic oligonucleotide"
  source 1..39: mol_type = other DNA

SEQ ID NO: 2336 - DNA, 33 bp, synthetic construct; identical to SEQ ID NO: 2226
  misc_feature 1..33: note = source = /note="Description of Artificial Sequence: Synthetic oligonucleotide"
  source 1..33: mol_type = other DNA

SEQ ID NO: 2337 - DNA, 33 bp, synthetic construct; identical to SEQ ID NO: 2200
  misc_feature 1..33: note = source = /note="Description of Artificial Sequence: Synthetic oligonucleotide"
  source 1..33: mol_type = other DNA

SEQ ID NO: 2338 - DNA, 39 bp, synthetic construct; identical to SEQ ID NO: 2199
  misc_feature 1..39: note = source = /note="Description of Artificial Sequence: Synthetic oligonucleotide"
  source 1..39: mol_type = other DNA

SEQ ID NO: 2339 - DNA, 33 bp, synthetic construct
  misc_feature 1..33: note = source = /note="Description of Artificial Sequence: Synthetic oligonucleotide"
  source 1..33: mol_type = other DNA
cgggcaagtcagaccattagcaggtttttaaat

SEQ ID NO: 2340 - DNA, 39 bp, synthetic construct
  misc_feature 1..39: note = source = /note="Description of Artificial Sequence: Synthetic oligonucleotide"
  source 1..39: mol_type = other DNA
tctggaagcagctccaacattggaaataattatgtatcc

SEQ ID NO: 2341 - DNA, 33 bp, synthetic construct; identical to SEQ ID NO: 2339
  misc_feature 1..33: note = source = /note="Description of Artificial Sequence: Synthetic oligonucleotide"
  source 1..33: mol_type = other DNA

SEQ ID NO: 2342 - DNA, 33 bp, synthetic construct; identical to SEQ ID NO: 2339
  misc_feature 1..33: note = source = /note="Description of Artificial Sequence: Synthetic oligonucleotide"
  source 1..33: mol_type = other DNA

SEQ ID NO: 2343 - DNA, 33 bp, synthetic construct; identical to SEQ ID NO: 2339
  misc_feature 1..33: note = source = /note="Description of Artificial Sequence: Synthetic oligonucleotide"
  source 1..33: mol_type = other DNA

SEQ ID NO: 2344 - DNA, 33 bp, synthetic construct; identical to SEQ ID NO: 2339
  misc_feature 1..33: note = source = /note="Description of Artificial Sequence: Synthetic oligonucleotide"
  source 1..33: mol_type = other DNA

SEQ ID NO: 2345 - DNA, 33 bp, synthetic construct; identical to SEQ ID NO: 2339
  misc_feature 1..33: note = source = /note="Description of Artificial Sequence: Synthetic oligonucleotide"
  source 1..33: mol_type = other DNA

SEQ ID NO: 2346 - DNA, 33 bp, synthetic construct; identical to SEQ ID NO: 2339
  misc_feature 1..33: note = source = /note="Description of Artificial Sequence: Synthetic oligonucleotide"
  source 1..33: mol_type = other DNA

SEQ ID NO: 2347 - DNA, 39 bp, synthetic construct; identical to SEQ ID NO: 2340
  misc_feature 1..39: note = source = /note="Description of Artificial Sequence: Synthetic oligonucleotide"
  source 1..39: mol_type = other DNA

SEQ ID NO: 2348 - DNA, 39 bp, synthetic construct; identical to SEQ ID NO: 2340
  misc_feature 1..39: note = source = /note="Description of Artificial Sequence: Synthetic oligonucleotide"
  source 1..39: mol_type = other DNA

SEQ ID NO: 2349 - DNA, 39 bp, synthetic construct; identical to SEQ ID NO: 2340
  misc_feature 1..39: note = source = /note="Description of Artificial Sequence: Synthetic oligonucleotide"
  source 1..39: mol_type = other DNA

SEQ ID NO: 2350 - DNA, 39 bp, synthetic construct; identical to SEQ ID NO: 2340
  misc_feature 1..39: note = source = /note="Description of Artificial Sequence: Synthetic oligonucleotide"
  source 1..39: mol_type = other DNA

SEQ ID NO: 2351 - DNA, 39 bp, synthetic construct; identical to SEQ ID NO: 2340
  misc_feature 1..39: note = source = /note="Description of Artificial Sequence: Synthetic oligonucleotide"
  source 1..39: mol_type = other DNA

SEQ ID NO: 2352 - DNA, 39 bp, synthetic construct; identical to SEQ ID NO: 2340
  misc_feature 1..39: note = source = /note="Description of Artificial Sequence: Synthetic oligonucleotide"
  source 1..39: mol_type = other DNA

SEQ ID NO: 2353 - DNA, 39 bp, synthetic construct; identical to SEQ ID NO: 2340
  misc_feature 1..39: note = source = /note="Description of Artificial Sequence: Synthetic oligonucleotide"
  source 1..39: mol_type = other DNA

SEQ ID NO: 2354 - DNA, 39 bp, synthetic construct; identical to SEQ ID NO: 2340
  misc_feature 1..39: note = source = /note="Description of Artificial Sequence: Synthetic oligonucleotide"
  source 1..39: mol_type = other DNA

SEQ ID NO: 2355 - DNA, 33 bp, synthetic construct; identical to SEQ ID NO: 2339
  misc_feature 1..33: note = source = /note="Description of Artificial Sequence: Synthetic oligonucleotide"
  source 1..33: mol_type = other DNA

SEQ ID NO: 2356 - DNA, 21 bp, synthetic construct
  misc_feature 1..21: note = source = /note="Description of Artificial Sequence: Synthetic oligonucleotide"
  source 1..21: mol_type = other DNA
actaataatcagcggccctca

SEQ ID NO: 2357 - DNA, 21 bp, synthetic construct
  misc_feature 1..21: note = source = /note="Description of Artificial Sequence: Synthetic oligonucleotide"
  source 1..21: mol_type = other DNA
ggtgcatccagtttgcaaagt

SEQ ID NO: 2358 - DNA, 21 bp, synthetic construct
  misc_feature 1..21: note = source = /note="Description of Artificial Sequence: Synthetic oligonucleotide"
  source 1..21: mol_type = other DNA
ggtgcatccagtttgcaaagt

SEQ ID NO: 2359 - DNA, 21 bp, synthetic construct
  misc_feature 1..21: note = source = /note="Description of Artificial Sequence: Synthetic oligonucleotide"
  source 1..21: mol_type = other DNA
gatgcatccaatttggaaaca

SEQ ID NO: 2360 - DNA, 21 bp, synthetic construct
  misc_feature 1..21: note = source = /note="Description of Artificial Sequence: Synthetic oligonucleotide"
  source 1..21: mol_type = other DNA
tgggcatctacccgggaatcc

SEQ ID NO: 2361 - DNA, 21 bp, synthetic construct
  misc_feature 1..21: note = source = /note="Description of Artificial Sequence: Synthetic oligonucleotide"
  source 1..21: mol_type = other DNA
tgggcatctacccgggaatcc

SEQ ID NO: 2362 - DNA, 21 bp, synthetic construct
  misc_feature 1..21: note = source = /note="Description of Artificial Sequence: Synthetic oligonucleotide"
  source 1..21: mol_type = other DNA
tggacttctacccgagattcc

SEQ ID NO: 2363 - DNA, 21 bp, synthetic construct
  misc_feature 1..21: note = source = /note="Description of Artificial Sequence: Synthetic oligonucleotide"
  source 1..21: mol_type = other DNA
tggacttctacccgagattcc

SEQ ID NO: 2364 - DNA, 21 bp, synthetic construct
  misc_feature 1..21: note = source = /note="Description of Artificial Sequence: Synthetic oligonucleotide"
  source 1..21: mol_type = other DNA
ggtgcatccagcagggccact

SEQ ID NO: 2365 - DNA, 21 bp, synthetic construct
  misc_feature 1..21: note = source = /note="Description of Artificial Sequence: Synthetic oligonucleotide"
  source 1..21: mol_type = other DNA
ggtgcagccaccagggccact

SEQ ID NO: 2366 - DNA, 21 bp, synthetic construct
  misc_feature 1..21: note = source = /note="Description of Artificial Sequence: Synthetic oligonucleotide"
  source 1..21: mol_type = other DNA
ggtgcatccagtttgcaaagt

SEQ ID NO: 2367 - DNA, 21 bp, synthetic construct
  misc_feature 1..21: note = source = /note="Description of Artificial Sequence: Synthetic oligonucleotide"
  source 1..21: mol_type = other DNA
gatgcttccaatttggagcca

SEQ ID NO: 2368 - DNA, 21 bp, synthetic construct
  misc_feature 1..21: note = source = /note="Description of Artificial Sequence: Synthetic oligonucleotide"
  source 1..21: mol_type = other DNA
gctgcatccagtttgcaaagt

SEQ ID NO: 2369 - DNA, 21 bp, synthetic construct
  misc_feature 1..21: note = source = /note="Description of Artificial Sequence: Synthetic oligonucleotide"
  source 1..21: mol_type = other DNA
gctgcatccagtttgcaaagt

SEQ ID NO: 2370 - DNA, 21 bp, synthetic construct
  misc_feature 1..21: note = source = /note="Description of Artificial Sequence: Synthetic oligonucleotide"
  source 1..21: mol_type = other DNA
ggtgcatccagtttgcaaagt

SEQ ID NO: 2371 - DNA, 21 bp, synthetic construct
  misc_feature 1..21: note = source = /note="Description of Artificial Sequence: Synthetic oligonucleotide"
  source 1..21: mol_type = other DNA
ggtgcatccagtttgcaaagt

SEQ ID NO: 2372 - DNA, 21 bp, synthetic construct
  misc_feature 1..21: note = source = /note="Description of Artificial Sequence: Synthetic oligonucleotide"
  source 1..21: mol_type = other DNA
ggtgcatccagtttgcaaagt

SEQ ID NO: 2373 - DNA, 21 bp, synthetic construct
  misc_feature 1..21: note = source = /note="Description of Artificial Sequence: Synthetic oligonucleotide"
  source 1..21: mol_type = other DNA
ggtgcatccagtttgcaaagt

SEQ ID NO: 2374 - DNA, 21 bp, synthetic construct
  misc_feature 1..21: note = source = /note="Description of Artificial Sequence: Synthetic oligonucleotide"
  source 1..21: mol_type = other DNA
ggtgcatccagtttgcaaagt

SEQ ID NO: 2375 - DNA, 21 bp, synthetic construct
  misc_feature 1..21: note = source = /note="Description of Artificial Sequence: Synthetic oligonucleotide"
  source 1..21: mol_type = other DNA
ggtgcatccagtttgcaaagt

SEQ ID NO: 2376 - DNA, 21 bp, synthetic construct
  misc_feature 1..21: note = source = /note="Description of Artificial Sequence: Synthetic oligonucleotide"
  source 1..21: mol_type = other DNA
ggtgcatccagtttgcaaagt

SEQ ID NO: 2377 - DNA, 21 bp, synthetic construct
  misc_feature 1..21: note = source = /note="Description of Artificial Sequence: Synthetic oligonucleotide"
  source 1..21: mol_type = other DNA
ggtgcatccagtttgcaaagt

SEQ ID NO: 2378 - DNA, 21 bp, synthetic construct
  misc_feature 1..21: note = source = /note="Description of Artificial Sequence: Synthetic oligonucleotide"
  source 1..21: mol_type = other DNA
ggtgcatccagtttgcaaagt

SEQ ID NO: 2379 - DNA, 21 bp, synthetic construct
  misc_feature 1..21: note = source = /note="Description of Artificial Sequence: Synthetic oligonucleotide"
  source 1..21: mol_type = other DNA
ggtgcatccagtttgcaaagt

SEQ ID NO: 2380 - DNA, 21 bp, synthetic construct
  misc_feature 1..21: note = source = /note="Description of Artificial Sequence: Synthetic oligonucleotide"
  source 1..21: mol_type = other DNA
ggtgcatccagtttgcaaagt

SEQ ID NO: 2381 - DNA, 21 bp, synthetic construct
  misc_feature 1..21: note = source = /note="Description of Artificial Sequence: Synthetic oligonucleotide"
  source 1..21: mol_type = other DNA
ggtgcatccagtttgcaaagt

SEQ ID NO: 2382 - DNA, 21 bp, synthetic construct
  misc_feature 1..21: note = source = /note="Description of Artificial Sequence: Synthetic oligonucleotide"
  source 1..21: mol_type = other DNA
ggtgcatccagtttgcaaagt

SEQ ID NO: 2383 - DNA, 21 bp, synthetic construct
  misc_feature 1..21: note = source = /note="Description of Artificial Sequence: Synthetic oligonucleotide"
  source 1..21: mol_type = other DNA
ggtgcatccagtttgcaaagt

SEQ ID NO: 2384 - DNA, 21 bp, synthetic construct
  misc_feature 1..21: note = source = /note="Description of Artificial Sequence: Synthetic oligonucleotide"
  source 1..21: mol_type = other DNA
ggtgcatccagtttgcaaagt

SEQ ID NO: 2385 - DNA, 21 bp, synthetic construct
  misc_feature 1..21: note = source = /note="Description of Artificial Sequence: Synthetic oligonucleotide"
  source 1..21: mol_type = other DNA
ggtgcatccagtttgcaaagt

SEQ ID NO: 2386 - DNA, 21 bp, synthetic construct
  misc_feature 1..21: note = source = /note="Description of Artificial Sequence: Synthetic oligonucleotide"
  source 1..21: mol_type = other DNA
ggtgcatccagtttgcaaagt

SEQ ID NO: 2387 - DNA, 21 bp, synthetic construct
  misc_feature 1..21: note = source = /note="Description of Artificial Sequence: Synthetic oligonucleotide"
  source 1..21: mol_type = other DNA
ggtgcatccagtttgcaaagt

SEQ ID NO: 2388 - DNA, 21 bp, synthetic construct
  misc_feature 1..21: note = source = /note="Description of Artificial Sequence: Synthetic oligonucleotide"
  source 1..21: mol_type = other DNA
ggtgcatccagtttgcaaagt

SEQ ID NO: 2389 - DNA, 21 bp, synthetic construct
  misc_feature 1..21: note = source = /note="Description of Artificial Sequence: Synthetic oligonucleotide"
  source 1..21: mol_type = other DNA
ggtgcatccagtttgcaaagt

SEQ ID NO: 2390 - DNA, 21 bp, synthetic construct
  misc_feature 1..21: note = source = /note="Description of Artificial Sequence: Synthetic oligonucleotide"
  source 1..21: mol_type = other DNA
ggtgcatccagtttgcaaagt

SEQ ID NO: 2391 - DNA, 21 bp, synthetic construct
  misc_feature 1..21: note = source = /note="Description of Artificial Sequence: Synthetic oligonucleotide"
  source 1..21: mol_type = other DNA
ggtgcatccagtttgcaaagt

SEQ ID NO: 2392 - DNA, 21 bp, synthetic construct
  misc_feature 1..21: note = source = /note="Description of Artificial Sequence: Synthetic oligonucleotide"
  source 1..21: mol_type = other DNA
ggtgcatccagtttgcaaagt

SEQ ID NO: 2393 - DNA, 21 bp, synthetic construct
  misc_feature 1..21: note = source = /note="Description of Artificial Sequence: Synthetic oligonucleotide"
  source 1..21: mol_type = other DNA
ggtgcatccagtttgcaaagt

SEQ ID NO: 2394 - DNA, 21 bp, synthetic construct
  misc_feature 1..21: note = source = /note="Description of Artificial Sequence: Synthetic oligonucleotide"
  source 1..21: mol_type = other DNA
ggtgcatccagtttgcaaagt

SEQ ID NO: 2395 - DNA, 21 bp, synthetic construct
  misc_feature 1..21: note = source = /note="Description of Artificial Sequence: Synthetic oligonucleotide"
  source 1..21: mol_type = other DNA
gatgcatccaatttggaaaca

SEQ ID NO: 2396 - DNA, 21 bp, synthetic construct
  misc_feature 1..21: note = source = /note="Description of Artificial Sequence: Synthetic oligonucleotide"
  source 1..21: mol_type = other DNA
gatgcatccaatttggaaaca

SEQ ID NO: 2397 - DNA, 21 bp, synthetic construct
  misc_feature 1..21: note = source = /note="Description of Artificial Sequence: Synthetic oligonucleotide"
  source 1..21: mol_type = other DNA
gatgcatccaatttggaaaca

SEQ ID NO: 2398 - DNA, 21 bp, synthetic construct
  misc_feature 1..21: note = source = /note="Description of Artificial Sequence: Synthetic oligonucleotide"
  source 1..21: mol_type = other DNA
gatgcatccaatttggaaaca

SEQ ID NO: 2399 - DNA, 21 bp, synthetic construct
  misc_feature 1..21: note = source = /note="Description of Artificial Sequence: Synthetic oligonucleotide"
  source 1..21: mol_type = other DNA
gatgcatccaatttggaaaca

SEQ ID NO: 2400 - DNA, 21 bp, synthetic construct
  misc_feature 1..21: note = source = /note="Description of Artificial Sequence: Synthetic oligonucleotide"
  source 1..21: mol_type = other DNA
gatgcatccaatttggaaaca

SEQ ID NO: 2401 - DNA, 21 bp, synthetic construct
  misc_feature 1..21: note = source = /note="Description of Artificial Sequence: Synthetic oligonucleotide"
  source 1..21: mol_type = other DNA
gatgcatccaatttggaaaca

SEQ ID NO: 2402 - DNA, 21 bp, synthetic construct
  misc_feature 1..21: note = source = /note="Description of Artificial Sequence: Synthetic oligonucleotide"
  source 1..21: mol_type = other DNA
gatgcatccaatttggaaaca

SEQ ID NO: 2403 - DNA, 21 bp, synthetic construct
  misc_feature 1..21: note = source = /note="Description of Artificial Sequence: Synthetic oligonucleotide"
  source 1..21: mol_type = other DNA
gatgcatccaatttggaaaca

SEQ ID NO: 2404 - DNA, 21 bp, synthetic construct
  misc_feature 1..21: note = source = /note="Description of Artificial Sequence: Synthetic oligonucleotide"
  source 1..21: mol_type = other DNA
ggtgcatccagtttgcaaagt

SEQ ID NO: 2405 - DNA, 21 bp, synthetic construct
  misc_feature 1..21: note = source = /note="Description of Artificial Sequence: Synthetic oligonucleotide"
  source 1..21: mol_type = other DNA
ggtgcatccagtttgcaaagt

SEQ ID NO: 2406 - DNA, 21 bp, synthetic construct
  misc_feature 1..21: note = source = /note="Description of Artificial Sequence: Synthetic oligonucleotide"
  source 1..21: mol_type = other DNA
ggtgcatccagtttgcaaagt

SEQ ID NO: 2407 - DNA, 21 bp, synthetic construct
  misc_feature 1..21: note = source = /note="Description of Artificial Sequence: Synthetic oligonucleotide"
  source 1..21: mol_type = other DNA
ggtgcatccagtttgcaaagt

SEQ ID NO: 2408 - DNA, 21 bp, synthetic construct
  misc_feature 1..21: note = source = /note="Description of Artificial Sequence: Synthetic oligonucleotide"
  source 1..21: mol_type = other DNA
ggtgcatccagtttgcaaagt

SEQ ID NO: 2409 - DNA, 21 bp, synthetic construct
  misc_feature 1..21: note = source = /note="Description of Artificial Sequence: Synthetic oligonucleotide"
  source 1..21: mol_type = other DNA
ggtgcatccagtttgcaaagt

SEQ ID NO: 2410 - DNA, 21 bp, synthetic construct
  misc_feature 1..21: note = source = /note="Description of Artificial Sequence: Synthetic oligonucleotide"
  source 1..21: mol_type = other DNA
ggtgcatccagtttgcaaagt

SEQ ID NO: 2411 - DNA, 21 bp, synthetic construct
  misc_feature 1..21: note = source = /note="Description of Artificial Sequence: Synthetic oligonucleotide"
  source 1..21: mol_type = other DNA
gatgcttccaatttggagcca

SEQ ID NO: 2412 - DNA, 21 bp, synthetic construct
  misc_feature 1..21: note = source = /note="Description of Artificial Sequence: Synthetic oligonucleotide"
  source 1..21: mol_type = other DNA
gatgcttccaatttggagcca

SEQ ID NO: 2413 - DNA, 21 bp, synthetic construct
  misc_feature 1..21: note = source = /note="Description of Artificial Sequence: Synthetic oligonucleotide"
  source 1..21: mol_type = other DNA
gatgcttccaatttggagcca

SEQ ID NO: 2414 - DNA, 21 bp, synthetic construct
  misc_feature 1..21: note = source = /note="Description of Artificial Sequence: Synthetic oligonucleotide"
  source 1..21: mol_type = other DNA
gatgcttccaatttggagcca

SEQ ID NO: 2415 - DNA, 21 bp, synthetic construct
  misc_feature 1..21: note = source = /note="Description of Artificial Sequence: Synthetic oligonucleotide"
  source 1..21: mol_type = other DNA
gatgcttccaatttggagcca

SEQ ID NO: 2416 - DNA, 21 bp, synthetic construct
  misc_feature 1..21: note = source = /note="Description of Artificial Sequence: Synthetic oligonucleotide"
  source 1..21: mol_type = other DNA
gatgcttccaatttggagcca

SEQ ID NO: 2417 - DNA, 21 bp, synthetic construct
  misc_feature 1..21: note = source = /note="Description of Artificial Sequence: Synthetic oligonucleotide"
  source 1..21: mol_type = other DNA
gatgcttccaatttggagcca

SEQ ID NO: 2418 - DNA, 21 bp, synthetic construct
  misc_feature 1..21: note = source = /note="Description of Artificial Sequence: Synthetic oligonucleotide"
  source 1..21: mol_type = other DNA
gatgcttccaatttggagcca

SEQ ID NO: 2419 - DNA, 21 bp, synthetic construct
  misc_feature 1..21: note = source = /note="Description of Artificial Sequence: Synthetic oligonucleotide"
  source 1..21: mol_type = other DNA
gatgcttccaatttggagcca

SEQ ID NO: 2420 - DNA, 21 bp, synthetic construct
  misc_feature 1..21: note = source = /note="Description of Artificial Sequence: Synthetic oligonucleotide"
  source 1..21: mol_type = other DNA
gatgcttccaatttggagcca

SEQ ID NO: 2421 - DNA, 21 bp, synthetic construct
  misc_feature 1..21: note = source = /note="Description of Artificial Sequence: Synthetic oligonucleotide"
  source 1..21: mol_type = other DNA
gatgcttccaatttggagcca

SEQ ID NO: 2422 - DNA, 21 bp, synthetic construct
  misc_feature 1..21: note = source = /note="Description of Artificial Sequence: Synthetic oligonucleotide"
  source 1..21: mol_type = other DNA
ggtgcatccagcagggccact

SEQ ID NO: 2423 - DNA, 21 bp, synthetic construct
  misc_feature 1..21: note = source = /note="Description of Artificial Sequence: Synthetic oligonucleotide"
  source 1..21: mol_type = other DNA
ggtgcatccagcagggccact

SEQ ID NO: 2424 - DNA, 21 bp, synthetic construct
  misc_feature 1..21: note = source = /note="Description of Artificial Sequence: Synthetic oligonucleotide"
  source 1..21: mol_type = other DNA
ggtgcatccagcagggccact

SEQ ID NO: 2425 - DNA, 21 bp, synthetic construct
  misc_feature 1..21: note = source = /note="Description of Artificial Sequence: Synthetic oligonucleotide"
  source 1..21: mol_type = other DNA
ggtgcatccagcagggccact

SEQ ID NO: 2426 - DNA, 21 bp, synthetic construct
  misc_feature 1..21: note = source = /note="Description of Artificial Sequence: Synthetic oligonucleotide"
  source 1..21: mol_type = other DNA
ggtgcagccaccagggccact

SEQ ID NO: 2427 - DNA, 21 bp, synthetic construct
  misc_feature 1..21: note = source = /note="Description of Artificial Sequence: Synthetic oligonucleotide"
  source 1..21: mol_type = other DNA
ggtgcagccaccagggccact

SEQ ID NO: 2428 - DNA, 21 bp, synthetic construct
  misc_feature 1..21: note = source = /note="Description of Artificial Sequence: Synthetic oligonucleotide"
  source 1..21: mol_type = other DNA
ggtgcagccaccagggccact

SEQ ID NO: 2429 - DNA, 21 bp, synthetic construct
  misc_feature 1..21: note = source = /note="Description of Artificial Sequence: Synthetic oligonucleotide"
  source 1..21: mol_type = other DNA
ggtgcagccaccagggccact

SEQ ID NO: 2430 - DNA, 21 bp, synthetic construct
  misc_feature 1..21: note = source = /note="Description of Artificial Sequence: Synthetic oligonucleotide"
  source 1..21: mol_type = other DNA
ggtgcagccaccagggccact

SEQ ID NO: 2431 - DNA, 21 bp, synthetic construct
  misc_feature 1..21: note = source = /note="Description of Artificial Sequence: Synthetic oligonucleotide"
  source 1..21: mol_type = other DNA
ggtgcagccaccagggccact

SEQ ID NO: 2432 - DNA, 21 bp, synthetic construct
  misc_feature 1..21: note = source = /note="Description of Artificial Sequence: Synthetic oligonucleotide"
  source 1..21: mol_type = other DNA
ggtgcagccaccagggccact

SEQ ID NO: 2433 - DNA, 21 bp, synthetic construct
  misc_feature 1..21: note = source = /note="Description of Artificial Sequence: Synthetic oligonucleotide"
  source 1..21: mol_type = other DNA
ggtgcagccaccagggccact

SEQ ID NO: 2434 - DNA, 21 bp, synthetic construct
  misc_feature 1..21: note = source = /note="Description of Artificial Sequence: Synthetic oligonucleotide"
  source 1..21: mol_type = other DNA
ggtgcatccagcagggccact

SEQ ID NO: 2435 - DNA, 21 bp, synthetic construct
  misc_feature 1..21: note = source = /note="Description of Artificial Sequence: Synthetic oligonucleotide"
  source 1..21: mol_type = other DNA
ggtgcatccagcagggccact

SEQ ID NO: 2436 - DNA, 21 bp, synthetic construct
  misc_feature 1..21: note = source = /note="Description of Artificial Sequence: Synthetic oligonucleotide"
  source 1..21: mol_type = other DNA
ggtgcatccagcagggccact

SEQ ID NO: 2437 - DNA, 21 bp, synthetic construct
  misc_feature 1..21: note = source = /note="Description of Artificial Sequence: Synthetic oligonucleotide"
  source 1..21: mol_type = other DNA
ggtgcatccagcagggccact

SEQ ID NO: 2438 - DNA, 21 bp, synthetic construct
  misc_feature 1..21: note = source = /note="Description of Artificial Sequence: Synthetic oligonucleotide"
  source 1..21: mol_type = other DNA
ggtgcatccagcagggccact

SEQ ID NO: 2439 - DNA, 21 bp, synthetic construct
  misc_feature 1..21: note = source = /note="Description of Artificial Sequence: Synthetic oligonucleotide"
  source 1..21: mol_type = other DNA
ggtgcatccagcagggccact

SEQ ID NO: 2440 - DNA, 21 bp, synthetic construct
  misc_feature 1..21: note = source = /note="Description of Artificial Sequence: Synthetic oligonucleotide"
  source 1..21: mol_type = other DNA
ggtgcatccagcagggccact

SEQ ID NO: 2441 - DNA, 21 bp, synthetic construct
  misc_feature 1..21: note = source = /note="Description of Artificial Sequence: Synthetic oligonucleotide"
  source 1..21: mol_type = other DNA
tgggcatctacccgggaatcc

SEQ ID NO: 2442 - DNA, 21 bp, synthetic construct
  misc_feature 1..21: note = source = /note="Description of Artificial Sequence: Synthetic oligonucleotide"
  source 1..21: mol_type = other DNA
tgggcatctacccgggaatcc

SEQ ID NO: 2443 - DNA, 21 bp, synthetic construct
  misc_feature 1..21: note = source = /note="Description of Artificial Sequence: Synthetic oligonucleotide"
  source 1..21: mol_type = other DNA
tgggcatctacccgggaatcc

SEQ ID NO: 2444 - DNA, 21 bp, synthetic construct
  misc_feature 1..21: note = source = /note="Description of Artificial Sequence: Synthetic oligonucleotide"
  source 1..21: mol_type = other DNA
tgggcatctacccgggaatcc

SEQ ID NO: 2445 - DNA, 21 bp, synthetic construct
  misc_feature 1..21: note = source = /note="Description of Artificial Sequence: Synthetic oligonucleotide"
  source 1..21: mol_type = other DNA
tgggcatctacccgggaatcc

SEQ ID NO: 2446 - DNA, 21 bp, synthetic construct
  misc_feature 1..21: note = source = /note="Description of Artificial Sequence: Synthetic oligonucleotide"
  source 1..21: mol_type = other DNA
tgggcatctacccgggaatcc

SEQ ID NO: 2447 - DNA, 21 bp, synthetic construct
  misc_feature 1..21: note = source = /note="Description of Artificial Sequence: Synthetic oligonucleotide"
  source 1..21: mol_type = other DNA
tgggcatctacccgggaatcc

SEQ ID NO: 2448 - DNA, 21 bp, synthetic construct
  misc_feature 1..21: note = source = /note="Description of Artificial Sequence: Synthetic oligonucleotide"
  source 1..21: mol_type = other DNA
tgggcatctacccgggaatcc

SEQ ID NO: 2449 - DNA, 21 bp, synthetic construct
  misc_feature 1..21: note = source = /note="Description of Artificial Sequence: Synthetic oligonucleotide"
  source 1..21: mol_type = other DNA
tgggcatctacccgggaatcc

SEQ ID NO: 2450 - DNA, 21 bp, synthetic construct
  misc_feature 1..21: note = source = /note="Description of Artificial Sequence: Synthetic oligonucleotide"
  source 1..21: mol_type = other DNA
tgggcatctacccgggaatcc

SEQ ID NO: 2451 - DNA, 21 bp, synthetic construct
  misc_feature 1..21: note = source = /note="Description of Artificial Sequence: Synthetic oligonucleotide"
  source 1..21: mol_type = other DNA
tgggcatctacccgggaatcc

SEQ ID NO: 2452 - DNA, 21 bp, synthetic construct
  misc_feature 1..21: note = source = /note="Description of Artificial Sequence: Synthetic oligonucleotide"
  source 1..21: mol_type = other DNA
tggacttctacccgagaatcc

SEQ ID NO: 2453 - DNA, 21 bp, synthetic construct
  misc_feature 1..21: note = source = /note="Description of Artificial Sequence: Synthetic oligonucleotide"
  source 1..21: mol_type = other DNA
tggacttctacccgagaatcc

SEQ ID NO: 2454 - DNA, 21 bp, synthetic construct
  misc_feature 1..21: note = source = /note="Description of Artificial Sequence: Synthetic oligonucleotide"
  source 1..21: mol_type = other DNA
tggacttctacccgagattcc

SEQ ID NO: 2455 - DNA, 21 bp, synthetic construct
  misc_feature 1..21: note = source = /note="Description of Artificial Sequence: Synthetic oligonucleotide"
  source 1..21: mol_type = other DNA
tggacttctacccgagaatcc

SEQ ID NO: 2456 - DNA, 21 bp, synthetic construct
  misc_feature 1..21: note = source = /note="Description of Artificial Sequence: Synthetic oligonucleotide"
  source 1..21: mol_type = other DNA
tggacttctacccgagaatcc

SEQ ID NO: 2457 - DNA, 21 bp, synthetic construct
  misc_feature 1..21: note = source = /note="Description of Artificial Sequence: Synthetic oligonucleotide"
  source 1..21: mol_type = other DNA
tggacttctacccgagattcc

SEQ ID NO: 2458 - DNA, 21 bp, synthetic construct
  misc_feature 1..21: note = source = /note="Description of Artificial Sequence: Synthetic oligonucleotide"
  source 1..21: mol_type = other DNA
tggacttctacccgagattcc

SEQ ID NO: 2459 - DNA, 21 bp, synthetic construct
  misc_feature 1..21: note = source = /note="Description of Artificial Sequence: Synthetic oligonucleotide"
  source 1..21: mol_type = other DNA
tggacttctacccgagaatcc

SEQ ID NO: 2460 - DNA, 21 bp, synthetic construct
  misc_feature 1..21: note = source = /note="Description of Artificial Sequence: Synthetic oligonucleotide"
  source 1..21: mol_type = other DNA
tggacttctacccgagaatcc

SEQ ID NO: 2461 - DNA, 21 bp, synthetic construct
  misc_feature 1..21: note = source = /note="Description of Artificial Sequence: Synthetic oligonucleotide"
  source 1..21: mol_type = other DNA
tgggcatctacccgggaatcc

SEQ ID NO: 2462 - DNA, 21 bp, synthetic construct
  misc_feature 1..21: note = source = /note="Description of Artificial Sequence: Synthetic oligonucleotide"
  source 1..21: mol_type = other DNA
tgggcatctacccgggaatcc

SEQ ID NO: 2463 - DNA, 21 bp, synthetic construct
  misc_feature 1..21: note = source = /note="Description of Artificial Sequence: Synthetic oligonucleotide"
  source 1..21: mol_type = other DNA
tgggcatctacccgggaatcc

SEQ ID NO: 2464 - DNA, 21 bp, synthetic construct
  misc_feature 1..21: note = source = /note="Description of Artificial Sequence: Synthetic oligonucleotide"
  source 1..21: mol_type = other DNA
tgggcatctacccgggaatcc

SEQ ID NO: 2465 - DNA, 21 bp, synthetic construct
  misc_feature 1..21: note = source = /note="Description of Artificial Sequence: Synthetic oligonucleotide"
  source 1..21: mol_type = other DNA
tgggcatctacccgggaatcc

SEQ ID NO: 2466 - DNA, 21 bp, synthetic construct
  misc_feature 1..21: note = source = /note="Description of Artificial Sequence: Synthetic oligonucleotide"
  source 1..21: mol_type = other DNA
tggacttctacccgagattcc

SEQ ID NO: 2467 - DNA, 21 bp, synthetic construct
  misc_feature 1..21: note = source = /note="Description of Artificial Sequence: Synthetic oligonucleotide"
  source 1..21: mol_type = other DNA
tggacttctacccgagattcc

SEQ ID NO: 2468 - DNA, 21 bp, synthetic construct
  misc_feature 1..21: note = source = /note="Description of Artificial Sequence: Synthetic oligonucleotide"
  source 1..21: mol_type = other DNA
tggacttctacccgagattcc

SEQ ID NO: 2469 - DNA, 21 bp, synthetic construct
  misc_feature 1..21: note = source = /note="Description of Artificial Sequence: Synthetic oligonucleotide"
  source 1..21: mol_type = other DNA
tggacttctacccgagattcc

SEQ ID NO: 2470 - DNA, 21 bp, synthetic construct
  misc_feature 1..21: note = source = /note="Description of Artificial Sequence: Synthetic oligonucleotide"
  source 1..21: mol_type = other DNA
tggacttctacccgagattcc

SEQ ID NO: 2471 - DNA, 21 bp, synthetic construct
  misc_feature 1..21: note = source = /note="Description of Artificial Sequence: Synthetic oligonucleotide"
  source 1..21: mol_type = other DNA
tggacttctacccgagattcc

SEQ ID NO: 2472 - DNA, 21 bp, synthetic construct
  misc_feature 1..21: note = source = /note="Description of Artificial Sequence: Synthetic oligonucleotide"
  source 1..21: mol_type = other DNA
tggacttctacccgagattcc

SEQ ID NO: 2473 - DNA, 21 bp, synthetic construct
  misc_feature 1..21: note = source = /note="Description of Artificial Sequence: Synthetic oligonucleotide"
  source 1..21: mol_type = other DNA
tggacttctacccgagaatcc

SEQ ID NO: 2474 - DNA, 21 bp, synthetic construct
  misc_feature 1..21: note = source = /note="Description of Artificial Sequence: Synthetic oligonucleotide"
  source 1..21: mol_type = other DNA
tggacttctacccgagaatcc

SEQ ID NO: 2475 - DNA, 21 bp, synthetic construct
  misc_feature 1..21: note = source = /note="Description of Artificial Sequence: Synthetic oligonucleotide"
  source 1..21: mol_type = other DNA
tggacttctacccgagaatcc

SEQ ID NO: 2476 - DNA, 21 bp, synthetic construct
  misc_feature 1..21: note = source = /note="Description of Artificial Sequence: Synthetic oligonucleotide"
  source 1..21: mol_type = other DNA
tggacttctacccgagaatcc

SEQ ID NO: 2477 - DNA, 21 bp, synthetic construct
  misc_feature 1..21: note = source = /note="Description of Artificial Sequence: Synthetic oligonucleotide"
  source 1..21: mol_type = other DNA
tggacttctacccgagattcc

SEQ ID NO: 2478 - DNA, 21 bp, synthetic construct
  misc_feature 1..21: note = source = /note="Description of Artificial Sequence: Synthetic oligonucleotide"
  source 1..21: mol_type = other DNA
tggacttctacccgagaatcc

SEQ ID NO: 2479 - DNA, 21 bp, synthetic construct
  misc_feature 1..21: note = source = /note="Description of Artificial Sequence: Synthetic oligonucleotide"
  source 1..21: mol_type = other DNA
actaataatcagcggccctca

SEQ ID NO: 2480 - DNA, 21 bp, synthetic construct
  misc_feature 1..21: note = source = /note="Description of Artificial Sequence: Synthetic oligonucleotide"
  source 1..21: mol_type = other DNA
actaataatcagcggccctca

SEQ ID NO: 2481 - DNA, 21 bp, synthetic construct
  misc_feature 1..21: note = source = /note="Description of Artificial Sequence: Synthetic oligonucleotide"
  source 1..21: mol_type = other DNA
actaataatcagcggccctca

SEQ ID NO: 2482 - DNA, 21 bp, synthetic construct
  misc_feature 1..21: note = source = /note="Description of Artificial Sequence: Synthetic oligonucleotide"
  source 1..21: mol_type = other DNA
actaataatcagcggccctca

SEQ ID NO: 2483 - DNA, 21 bp, synthetic construct
  misc_feature 1..21: note = source = /note="Description of Artificial Sequence: Synthetic oligonucleotide"
  source 1..21: mol_type = other DNA
actaataatcagcggccctca

SEQ ID NO: 2484 - DNA, 21 bp, synthetic construct
  misc_feature 1..21: note = source = /note="Description of Artificial Sequence: Synthetic oligonucleotide"
  source 1..21: mol_type = other DNA
actaataatcagcggccctca

SEQ ID NO: 2485 - DNA, 21 bp, synthetic construct
  misc_feature 1..21: note = source = /note="Description of Artificial Sequence: Synthetic oligonucleotide"
  source 1..21: mol_type = other DNA
actaataatcagcggccctca

SEQ ID NO: 2486 - DNA, 21 bp, synthetic construct
  misc_feature 1..21: note = source = /note="Description of Artificial Sequence: Synthetic oligonucleotide"
  source 1..21: mol_type = other DNA
actaataatcagcggccctca

SEQ ID NO: 2487 - DNA, 21 bp, synthetic construct
  misc_feature 1..21: note = source = /note="Description of Artificial Sequence: Synthetic oligonucleotide"
  source 1..21: mol_type = other DNA
actaataatcagcggccctca

SEQ ID NO: 2488 - DNA, 21 bp, synthetic construct
  misc_feature 1..21: note = source = /note="Description of Artificial Sequence: Synthetic oligonucleotide"
  source 1..21: mol_type = other DNA
actaataatcagcggccctca

SEQ ID NO: 2489 - DNA, 21 bp, synthetic construct
  misc_feature 1..21: note = source = /note="Description of Artificial Sequence: Synthetic oligonucleotide"
  source 1..21: mol_type = other DNA
actaataatcagcggccctca

SEQ ID NO: 2490 - DNA, 21 bp, synthetic construct
  misc_feature 1..21: note = source = /note="Description of Artificial Sequence: Synthetic oligonucleotide"
  source 1..21: mol_type = other DNA
actaataatcagcggccctca

SEQ ID NO: 2491 - DNA, 21 bp, synthetic construct
  misc_feature 1..21: note = source = /note="Description of Artificial Sequence: Synthetic oligonucleotide"
  source 1..21: mol_type = other DNA
actaataatcagcggccctca

SEQ ID NO: 2492 - DNA, 21 bp, synthetic construct
  misc_feature 1..21: note = source = /note="Description of Artificial Sequence: Synthetic oligonucleotide"
  source 1..21: mol_type = other DNA
actaataatcagcggccctca

SEQ ID NO: 2493 - DNA, 21 bp, synthetic construct
  misc_feature 1..21: note = source = /note="Description of Artificial Sequence: Synthetic oligonucleotide"
  source 1..21: mol_type = other DNA
ggtgcatccagtttgcaaagt

SEQ ID NO: 2494 - DNA, 21 bp, synthetic construct
  misc_feature 1..21: note = source = /note="Description of Artificial Sequence: Synthetic oligonucleotide"
  source 1..21: mol_type = other DNA
ggtgcatccagtttgcaaagt

SEQ ID NO: 2495 - DNA, 21 bp, synthetic construct
  misc_feature 1..21: note = source = /note="Description of Artificial Sequence: Synthetic oligonucleotide"
  source 1..21: mol_type = other DNA
actaataatcagcggccctca

SEQ ID NO: 2496 - DNA, 21 bp, synthetic construct
  misc_feature 1..21: note = source = /note="Description of Artificial Sequence: Synthetic oligonucleotide"
  source 1..21: mol_type = other DNA
gttgcatccagtttgcaaagt

SEQ ID NO: 2497 - DNA, 21 bp, synthetic construct
  misc_feature 1..21: note = source = /note="Description of Artificial Sequence: Synthetic oligonucleotide"
  source 1..21: mol_type = other DNA
gacaataataagcgaccctca

SEQ ID NO: 2498 - DNA, 21 bp, synthetic construct
  misc_feature 1..21: note = source = /note="Description of Artificial Sequence: Synthetic oligonucleotide"
  source 1..21: mol_type = other DNA
gttgcatccagtttgcaaagt

SEQ ID NO: 2499 - DNA, 21 bp, synthetic construct
  misc_feature 1..21: note = source = /note="Description of Artificial Sequence: Synthetic oligonucleotide"
  source 1..21: mol_type = other DNA
gttgcatccagtttgcaaagt

SEQ ID NO: 2500 - DNA, 21 bp, synthetic construct
  misc_feature 1..21: note = source = /note="Description of Artificial Sequence: Synthetic oligonucleotide"
  source 1..21: mol_type = other DNA
gttgcatccagtttgcaaagt

SEQ ID NO: 2501 - DNA, 21 bp, synthetic construct
  misc_feature 1..21: note = source = /note="Description of Artificial Sequence: Synthetic oligonucleotide"
  source 1..21: mol_type = other DNA
gttgcatccagtttgcaaagt

SEQ ID NO: 2502 - DNA, 21 bp, synthetic construct
  misc_feature 1..21: note = source = /note="Description of Artificial Sequence: Synthetic oligonucleotide"
  source 1..21: mol_type = other DNA
gttgcatccagtttgcaaagt

SEQ ID NO: 2503 - DNA, 21 bp, synthetic construct
  misc_feature 1..21: note = source = /note="Description of Artificial Sequence: Synthetic oligonucleotide"
  source 1..21: mol_type = other DNA
gttgcatccagtttgcaaagt

SEQ ID NO: 2504 - DNA, 21 bp, synthetic construct
  misc_feature 1..21: note = source = /note="Description of Artificial Sequence: Synthetic oligonucleotide"
  source 1..21: mol_type = other DNA
gacaataataagcgaccctca

SEQ ID NO: 2505 - DNA, 21 bp, synthetic construct
  misc_feature 1..21: note = source = /note="Description of Artificial Sequence: Synthetic oligonucleotide"
  source 1..21: mol_type = other DNA
gacaataataagcgaccctca

SEQ ID NO: 2506 - DNA, 21 bp, synthetic construct
  misc_feature 1..21: note = source = /note="Description of Artificial Sequence: Synthetic oligonucleotide"
  source 1..21: mol_type = other DNA
gacaataataagcgaccctca

SEQ ID NO: 2507 - DNA, 21 bp, synthetic construct
  misc_feature 1..21: note = source = /note="Description of Artificial Sequence: Synthetic oligonucleotide"
  source 1..21: mol_type = other DNA
gacaataataagcgaccctca

SEQ ID NO: 2508 - DNA, 21 bp, synthetic construct
  misc_feature 1..21: note = source = /note="Description of Artificial Sequence: Synthetic oligonucleotide"
  source 1..21: mol_type = other DNA
gacaataataagcgaccctca

SEQ ID NO: 2509 - DNA, 21 bp, synthetic construct
  misc_feature 1..21: note = source = /note="Description of Artificial Sequence: Synthetic oligonucleotide"
  source 1..21: mol_type = other DNA
gacaataataagcgaccctca

SEQ ID NO: 2510 - DNA, 21 bp, synthetic construct
  misc_feature 1..21: note = source = /note="Description of Artificial Sequence: Synthetic oligonucleotide"
  source 1..21: mol_type = other DNA
gacaataataagcgaccctca

SEQ ID NO: 2511 - DNA, 21 bp, synthetic construct
  misc_feature 1..21: note = source = /note="Description of Artificial Sequence: Synthetic oligonucleotide"
  source 1..21: mol_type = other DNA
gacaataataagcgaccctca

SEQ ID NO: 2512 - DNA, 21 bp, synthetic construct
  misc_feature 1..21: note = source = /note="Description of Artificial Sequence: Synthetic oligonucleotide"
  source 1..21: mol_type = other DNA
gttgcatccagtttgcaaagt

SEQ ID NO: 2513 - DNA, 33 bp, synthetic construct
  misc_feature 1..33: note = source = /note="Description of Artificial Sequence: Synthetic oligonucleotide"
  source 1..33: mol_type = other DNA
gcaacattcgatgacagcctgaatggtccggta

SEQ ID NO: 2514 - DNA, 27 bp, synthetic construct
  misc_feature 1..27: note = source = /note="Description of Artificial Sequence: Synthetic oligonucleotide"
  source 1..27: mol_type = other DNA
ctacagcataataattaccccttcact

SEQ ID NO: 2515 - DNA, 27 bp, synthetic construct
  misc_feature 1..27: note = source = /note="Description of Artificial Sequence: Synthetic oligonucleotide"
  source 1..27: mol_type = other DNA
ctacagcataataattaccccttcact

SEQ ID NO: 2516 - DNA, 24 bp, synthetic construct
  misc_feature 1..24: note = source = /note="Description of Artificial Sequence: Synthetic oligonucleotide"
  source 1..24: mol_type = other DNA
caacagtatgatattctcctcact

SEQ ID NO: 2517 - DNA, 27 bp, synthetic construct
  misc_feature 1..27: note = source = /note="Description of Artificial Sequence: Synthetic oligonucleotide"
  source 1..27: mol_type = other DNA
caacaatattatagtactccgtggacg

SEQ ID NO: 2518 - DNA, 27 bp, synthetic construct
  misc_feature 1..27: note = source = /note="Description of Artificial Sequence: Synthetic oligonucleotide"
  source 1..27: mol_type = other DNA
caacaatattatagtactccgtggacg

SEQ ID NO: 2519 - DNA, 27 bp, synthetic construct
  misc_feature 1..27: note = source = /note="Description of Artificial Sequence: Synthetic oligonucleotide"
  source 1..27: mol_type = other DNA
cagcaatattatcgtactccgtggacg

SEQ ID NO: 2520 - DNA, 27 bp, synthetic construct
  misc_feature 1..27: note = source = /note="Description of Artificial Sequence: Synthetic oligonucleotide"
  source 1..27: mol_type = other DNA
cagcaatattatcgtactccgtggacg

SEQ ID NO: 2521 - DNA, 27 bp, synthetic construct
  misc_feature 1..27: note = source = /note="Description of Artificial Sequence: Synthetic oligonucleotide"
  source 1..27: mol_type = other DNA
cagcagtatggtagttcaccgctcact

SEQ ID NO: 2522 - DNA, 27 bp, synthetic construct
  misc_feature 1..27: note = source = /note="Description of Artificial Sequence: Synthetic oligonucleotide"
  source 1..27: mol_type = other DNA
cagcagtataataactggcctctcact

SEQ ID NO: 2523 - DNA, 27 bp, synthetic construct
  misc_feature 1..27: note = source = /note="Description of Artificial Sequence: Synthetic oligonucleotide"
  source 1..27: mol_type = other DNA
ctacagcataatagttacccattcact

SEQ ID NO: 2524 - DNA, 24 bp, synthetic construct
  misc_feature 1..24: note = source = /note="Description of Artificial Sequence: Synthetic oligonucleotide"
  source 1..24: mol_type = other DNA
caacagtatgatgatctattcact

SEQ ID NO: 2525 - DNA, 27 bp, synthetic construct
  misc_feature 1..27: note = source = /note="Description of Artificial Sequence: Synthetic oligonucleotide"
  source 1..27: mol_type = other DNA
caacagactaacagtttccctccgacg

SEQ ID NO: 2526 - DNA, 27 bp, synthetic construct
  misc_feature 1..27: note = source = /note="Description of Artificial Sequence: Synthetic oligonucleotide"
  source 1..27: mol_type = other DNA
caacagactaacagtttccctccgacg

SEQ ID NO: 2527 - DNA, 27 bp, synthetic construct
  misc_feature 1..27: note = source = /note="Description of Artificial Sequence: Synthetic oligonucleotide"
  source 1..27: mol_type = other DNA
ctacagcataatagttacccattcact

SEQ ID NO: 2528 - DNA, 27 bp, synthetic construct
  misc_feature 1..27: note = source = /note="Description of Artificial Sequence: Synthetic oligonucleotide"
  source 1..27: mol_type = other DNA
ctacagcataatagttacccattcact

SEQ ID NO: 2529 - DNA, 27 bp, synthetic construct
  misc_feature 1..27: note = source = /note="Description of Artificial Sequence: Synthetic oligonucleotide"
  source 1..27: mol_type = other DNA
ctacagcataatagttacccattcact

SEQ ID NO: 2530 - DNA, 27 bp, synthetic construct
  misc_feature 1..27: note = source = /note="Description of Artificial Sequence: Synthetic oligonucleotide"
  source 1..27: mol_type = other DNA
ctacagcataatagttacccattcact

SEQ ID NO: 2531 - DNA, 27 bp, synthetic construct
  misc_feature 1..27: note = source = /note="Description of Artificial Sequence: Synthetic oligonucleotide"
  source 1..27: mol_type = other DNA
ctacagcataatagttacccattcact

SEQ ID NO: 2532 - DNA, 27 bp, synthetic construct
  misc_feature 1..27: note = source = /note="Description of Artificial Sequence: Synthetic oligonucleotide"
  source 1..27: mol_type = other DNA
ctacagcataatagttacccattcact

SEQ ID NO: 2533 - DNA, 27 bp, synthetic construct
  misc_feature 1..27: note = source = /note="Description of Artificial Sequence: Synthetic oligonucleotide"
  source 1..27: mol_type = other DNA
ctacagcataataattaccccttcact

SEQ ID NO: 2534 - DNA, 27 bp, synthetic construct
  misc_feature 1..27: note = source = /note="Description of Artificial Sequence: Synthetic oligonucleotide"
  source 1..27: mol_type = other DNA
ctacagcataataattaccccttcact

SEQ ID NO: 2535 - DNA, 27 bp, synthetic construct
  misc_feature 1..27: note = source = /note="Description of Artificial Sequence: Synthetic oligonucleotide"
  source 1..27: mol_type = other DNA
ctacagcataataattaccccttcact

SEQ ID NO: 2536 - DNA, 27 bp, synthetic construct
  misc_feature 1..27: note = source = /note="Description of Artificial Sequence: Synthetic oligonucleotide"
  source 1..27: mol_type = other DNA
ctacagcataataattaccccttcact

SEQ ID NO: 2537 - DNA, 27 bp, synthetic construct
  misc_feature 1..27: note = source = /note="Description of Artificial Sequence: Synthetic oligonucleotide"
  source 1..27: mol_type = other DNA
ctacagcataataattaccccttcact

SEQ ID NO: 2538 - DNA, 27 bp, synthetic construct
  misc_feature 1..27: note = source = /note="Description of Artificial Sequence: Synthetic oligonucleotide"
  source 1..27: mol_type = other DNA
ctacagcataataattaccccttcact

SEQ ID NO: 2539 - DNA, 27 bp, synthetic construct
  misc_feature 1..27: note = source = /note="Description of Artificial Sequence: Synthetic oligonucleotide"
  source 1..27: mol_type = other DNA
ctacagcataataattaccccttcact

SEQ ID NO: 2540 - DNA, 27 bp, synthetic construct
  misc_feature 1..27: note = source = /note="Description of Artificial Sequence: Synthetic oligonucleotide"
  source 1..27: mol_type = other DNA
ctacagcataataattaccccttcact

SEQ ID NO: 2541 - DNA, 27 bp, synthetic construct
  misc_feature 1..27: note = source = /note="Description of Artificial Sequence: Synthetic oligonucleotide"
  source 1..27: mol_type = other DNA
ctacagcataataattaccccttcact

SEQ ID NO: 2542 - DNA, 27 bp, synthetic construct
  misc_feature 1..27: note = source = /note="Description of Artificial Sequence: Synthetic oligonucleotide"
  source 1..27: mol_type = other DNA
ctacagcataataattaccccttcact

SEQ ID NO: 2543 - DNA, 27 bp, synthetic construct
  misc_feature 1..27: note = source = /note="Description of Artificial Sequence: Synthetic oligonucleotide"
  source 1..27: mol_type = other DNA
ctacagcataataattaccccttcact

SEQ ID NO: 2544 - DNA, 27 bp, synthetic construct
  misc_feature 1..27: note = source = /note="Description of Artificial Sequence: Synthetic oligonucleotide"
  source 1..27: mol_type = other DNA
ctacagcataataattaccccttcact

SEQ ID NO: 2545 - DNA, 27 bp, synthetic construct
  misc_feature 1..27: note = source = /note="Description of Artificial Sequence: Synthetic oligonucleotide"
  source 1..27: mol_type = other DNA
ctacagcataataattaccccttcact

SEQ ID NO: 2546 - DNA, 27 bp, synthetic construct
  misc_feature 1..27: note = source = /note="Description of Artificial Sequence: Synthetic oligonucleotide"
  source 1..27: mol_type = other DNA
ctacagcataataattaccccttcact

SEQ ID NO: 2547 - DNA, 27 bp, synthetic construct
  misc_feature 1..27: note = source = /note="Description of Artificial Sequence: Synthetic oligonucleotide"
  source 1..27: mol_type = other DNA
ctacagcataataattaccccttcact

SEQ ID NO: 2548 - DNA, 27 bp, synthetic construct
  misc_feature 1..27: note = source = /note="Description of Artificial Sequence: Synthetic oligonucleotide"
  source 1..27: mol_type = other DNA
ctacagcataataattaccccttcact

SEQ ID NO: 2549 - DNA, 27 bp, synthetic construct
  misc_feature 1..27: note = source = /note="Description of Artificial Sequence: Synthetic oligonucleotide"
  source 1..27: mol_type = other DNA
ctacagcataataattaccccttcact

SEQ ID NO: 2550 - DNA, 27 bp, synthetic construct
  misc_feature 1..27: note = source = /note="Description of Artificial Sequence: Synthetic oligonucleotide"
  source 1..27: mol_type = other DNA
ctacagcataataattaccccttcact

SEQ ID NO: 2551 - DNA, 27 bp, synthetic construct
  misc_feature 1..27: note = source = /note="Description of Artificial Sequence: Synthetic oligonucleotide"
  source 1..27: mol_type = other DNA
ctacagcataataattaccccttcact

SEQ ID NO: 2552 - DNA, 24 bp, synthetic construct
  misc_feature 1..24: note = source = /note="Description of Artificial Sequence: Synthetic oligonucleotide"
  source 1..24: mol_type = other DNA
caacagtatgatattctcctcact

SEQ ID NO: 2553 - DNA, 24 bp, synthetic construct
  misc_feature 1..24: note = source = /note="Description of Artificial Sequence: Synthetic oligonucleotide"
  source 1..24: mol_type = other DNA
caacagtatgatattctcctcact

SEQ ID NO: 2554 - DNA, 24 bp, synthetic construct
  misc_feature 1..24: note = source = /note="Description of Artificial Sequence: Synthetic oligonucleotide"
  source 1..24: mol_type = other DNA
caacagtatgatattctcctcact

SEQ ID NO: 2555 - DNA, 24 bp, synthetic construct
  misc_feature 1..24: note = source = /note="Description of Artificial Sequence: Synthetic oligonucleotide"
  source 1..24: mol_type = other DNA
caacagtatgatattctcctcact

SEQ ID NO: 2556 - DNA, 24 bp, synthetic construct
  misc_feature 1..24: note = source = /note="Description of Artificial Sequence: Synthetic oligonucleotide"
  source 1..24: mol_type = other DNA
caacagtatgatattctcctcact

SEQ ID NO: 2557 - DNA, 24 bp, synthetic construct
  misc_feature 1..24: note = source = /note="Description of Artificial Sequence: Synthetic oligonucleotide"
  source 1..24: mol_type = other DNA
caacagtatgatattctcctcact

SEQ ID NO: 2558 - DNA, 24 bp, synthetic construct
  misc_feature 1..24: note = source = /note="Description of Artificial Sequence: Synthetic oligonucleotide"
  source 1..24: mol_type = other DNA
caacagtatgatattctcctcact

SEQ ID NO: 2559 - DNA, 24 bp, synthetic construct
  misc_feature 1..24: note = source = /note="Description of Artificial Sequence: Synthetic oligonucleotide"
  source 1..24: mol_type = other DNA
caacagtatgatattctcctcact

SEQ ID NO: 2560 - DNA, 24 bp, synthetic construct
  misc_feature 1..24: note = source = /note="Description of Artificial Sequence: Synthetic oligonucleotide"
  source 1..24: mol_type = other DNA
caacagtatgatattctcctcact

SEQ ID NO: 2561 - DNA, 27 bp, synthetic construct
  misc_feature 1..27: note = source = /note="Description of Artificial Sequence: Synthetic oligonucleotide"
  source 1..27: mol_type = other DNA
ctacagcataataattaccccttcact

SEQ ID NO: 2562 - DNA, 27 bp, synthetic construct
  misc_feature 1..27: note = source = /note="Description of Artificial Sequence: Synthetic oligonucleotide"
  source 1..27: mol_type = other DNA
ctacagcataataattaccccttcact

SEQ ID NO: 2563 - DNA, 27 bp, synthetic construct
  misc_feature 1..27: note = source = /note="Description of Artificial Sequence: Synthetic oligonucleotide"
  source 1..27: mol_type = other DNA
ctacagcataataattaccccttcact

SEQ ID NO: 2564 - DNA, 27 bp, synthetic construct
  misc_feature 1..27: note = source = /note="Description of Artificial Sequence: Synthetic oligonucleotide"
  source 1..27: mol_type = other DNA
ctacagcataataattaccccttcact

SEQ ID NO: 2565 - DNA, 27 bp, synthetic construct
  misc_feature 1..27: note = source = /note="Description of Artificial Sequence: Synthetic oligonucleotide"
  source 1..27: mol_type = other DNA
ctacagcataataattaccccttcact

SEQ ID NO: 2566 - DNA, 27 bp, synthetic construct
  misc_feature 1..27: note = source = /note="Description of Artificial Sequence: Synthetic oligonucleotide"
  source 1..27: mol_type = other DNA
ctacagcataataattaccccttcact

SEQ ID NO: 2567 - DNA, 27 bp, synthetic construct
  misc_feature 1..27: note = source = /note="Description of Artificial Sequence: Synthetic oligonucleotide"
  source 1..27: mol_type = other DNA
ctacagcataataattaccccttcact

SEQ ID NO: 2568 - DNA, 24 bp, synthetic construct
  misc_feature 1..24: note = source = /note="Description of Artificial Sequence: Synthetic oligonucleotide"
  source 1..24: mol_type = other DNA
caacagtatgatgatctattcact

SEQ ID NO: 2569 - DNA, 24 bp, synthetic construct
  misc_feature 1..24: note = source = /note="Description of Artificial Sequence: Synthetic oligonucleotide"
  source 1..24: mol_type = other DNA
caacagtatgatgatctattcact

SEQ ID NO: 2570 - DNA, 24 bp, synthetic construct
  misc_feature 1..24: note = source = /note="Description of Artificial Sequence: Synthetic oligonucleotide"
  source 1..24: mol_type = other DNA
caacagtatgatgatctattcact

SEQ ID NO: 2571 - DNA, 24 bp, synthetic construct
  misc_feature 1..24: note = source = /note="Description of Artificial Sequence: Synthetic oligonucleotide"
  source 1..24: mol_type = other DNA
caacagtatgatgatctattcact

SEQ ID NO: 2572 - DNA, 24 bp, synthetic construct
  misc_feature 1..24: note = source = /note="Description of Artificial Sequence: Synthetic oligonucleotide"
  source 1..24: mol_type = other DNA
caacagtatgatgatctattcact

SEQ ID NO: 2573 - DNA, 24 bp, synthetic construct
  misc_feature 1..24: note = source = /note="Description of Artificial Sequence: Synthetic oligonucleotide"
  source 1..24: mol_type = other DNA
caacagtatgatgatctattcact

SEQ ID NO: 2574 - DNA, 24 bp, synthetic construct
  misc_feature 1..24: note = source = /note="Description of Artificial Sequence: Synthetic oligonucleotide"
  source 1..24: mol_type = other DNA
caacagtatgatgatctattcact

SEQ ID NO: 2575 - DNA, 24 bp, synthetic construct
  misc_feature 1..24: note = source = /note="Description of Artificial Sequence: Synthetic oligonucleotide"
  source 1..24: mol_type = other DNA
caacagtatgatgatctattcact

SEQ ID NO: 2576 - DNA, 24 bp, synthetic construct
  misc_feature 1..24: note = source = /note="Description of Artificial Sequence: Synthetic oligonucleotide"
  source 1..24: mol_type = other DNA
caacagtatgatgatctattcact

SEQ ID NO: 2577 - DNA, 24 bp, synthetic construct
  misc_feature 1..24: note = source = /note="Description of Artificial Sequence: Synthetic oligonucleotide"
  source 1..24: mol_type = other DNA
caacagtatgatgatctattcact

SEQ ID NO: 2578 - DNA, 24 bp, synthetic construct
  misc_feature 1..24: note = source = /note="Description of Artificial Sequence: Synthetic oligonucleotide"
  source 1..24: mol_type = other DNA
caacagtatgatgatctattcact

SEQ ID NO: 2579 - DNA, 24 bp, synthetic construct
  misc_feature 1..24: note = source = /note="Description of Artificial Sequence: Synthetic oligonucleotide"
  source 1..24: mol_type = other DNA
cagcagtatggtagctcacctcgc

SEQ ID NO: 2580 - DNA, 24 bp, synthetic construct
  misc_feature 1..24: note = source = /note="Description of Artificial Sequence: Synthetic oligonucleotide"
  source 1..24: mol_type = other DNA
cagcagtatggtagctcacctcgc

SEQ ID NO: 2581 - DNA, 24 bp, synthetic construct
  misc_feature 1..24: note = source = /note="Description of Artificial Sequence: Synthetic oligonucleotide"
  source 1..24: mol_type = other DNA
cagcagtatggtagctcacctcgc

SEQ ID NO: 2582 - DNA, 24 bp, synthetic construct
  misc_feature 1..24: note = source = /note="Description of Artificial Sequence: Synthetic oligonucleotide"
  source 1..24: mol_type = other DNA
cagcagtatggtagctcacctcgc

SEQ ID NO: 2583 - DNA, 27 bp, synthetic construct
  misc_feature 1..27: note = source = /note="Description of Artificial Sequence: Synthetic oligonucleotide"
  source 1..27: mol_type = other DNA
cagcagtataataactggcctctcact

SEQ ID NO: 2584 - DNA, 27 bp, synthetic construct
  misc_feature 1..27: note = source = /note="Description of Artificial Sequence: Synthetic oligonucleotide"
  source 1..27: mol_type = other DNA
cagcagtataataactggcctctcact

SEQ ID NO: 2585 - DNA, 27 bp, synthetic construct
  misc_feature 1..27: note = source = /note="Description of Artificial Sequence: Synthetic oligonucleotide"
  source 1..27: mol_type = other DNA
cagcagtataataactggcctctcact

SEQ ID NO: 2586 - DNA, 27 bp, synthetic construct
  misc_feature 1..27: note = source = /note="Description of Artificial Sequence: Synthetic oligonucleotide"
  source 1..27: mol_type = other DNA
cagcagtataataactggcctctcact

SEQ ID NO: 2587 - DNA, 27 bp, synthetic construct
  misc_feature 1..27: note = source = /note="Description of Artificial Sequence: Synthetic oligonucleotide"
  source 1..27: mol_type = other DNA
cagcagtataataacttccctctcact

SEQ ID NO: 2588 - DNA, 27 bp, synthetic construct
  misc_feature 1..27: note = source = /note="Description of Artificial Sequence: Synthetic oligonucleotide"
  source 1..27: mol_type = other DNA
cagcagtataataactatcctctcact

SEQ ID NO: 2589 - DNA, 27 bp, synthetic construct
  misc_feature 1..27: note = source = /note="Description of Artificial Sequence: Synthetic oligonucleotide"
  source 1..27: mol_type = other DNA
cagcagtataataactggcctctcact

SEQ ID NO: 2590 - DNA, 27 bp, synthetic construct
  misc_feature 1..27: note = source = /note="Description of Artificial Sequence: Synthetic oligonucleotide"
  source 1..27: mol_type = other DNA
cagcagtataataactggcctctcact

SEQ ID NO: 2591 - DNA, 27 bp, synthetic construct
  misc_feature 1..27: note = source = /note="Description of Artificial Sequence: Synthetic oligonucleotide"
  source 1..27: mol_type = other DNA
cagcagtatggtagttcaccgctcact

SEQ ID NO: 2592 - DNA, 27 bp, synthetic construct
  misc_feature 1..27: note = source = /note="Description of Artificial Sequence: Synthetic oligonucleotide"
  source 1..27: mol_type = other DNA
cagcagtatggtagttcaccgctcact

SEQ ID NO: 2593 - DNA, 27 bp, synthetic construct
  misc_feature 1..27: note = source = /note="Description of Artificial Sequence: Synthetic oligonucleotide"
  source 1..27: mol_type = other DNA
cagcagtatggtagttcaccgctcact

SEQ ID NO: 2594 - DNA, 27 bp, synthetic construct
  misc_feature 1..27: note = source = /note="Description of Artificial Sequence: Synthetic oligonucleotide"
  source 1..27: mol_type = other DNA
cagcagtatggtagttcaccgctcact

SEQ ID NO: 2595 - DNA, 27 bp, synthetic construct
  misc_feature 1..27: note = source = /note="Description of Artificial Sequence: Synthetic oligonucleotide"
  source 1..27: mol_type = other DNA
cagcagtatggtagttcaccgctcact

SEQ ID NO: 2596 - DNA, 27 bp, synthetic construct
  misc_feature 1..27: note = source = /note="Description of Artificial Sequence: Synthetic oligonucleotide"
  source 1..27: mol_type = other DNA
cagcagtatggtagttcaccgctcact

SEQ ID NO: 2597 - DNA, 27 bp, synthetic construct
  misc_feature 1..27: note = source = /note="Description of Artificial Sequence: Synthetic oligonucleotide"
  source 1..27: mol_type = other DNA
cagcagtatggtagttcaccgctcact

SEQ ID NO: 2598 - DNA, 27 bp, synthetic construct
  misc_feature 1..27: note = source = /note="Description of Artificial Sequence: Synthetic oligonucleotide"
  source 1..27: mol_type = other DNA
caacaatattatagtactccgtggacg

SEQ ID NO: 2599 - DNA, 27 bp, synthetic construct
  misc_feature 1..27: note = source = /note="Description of Artificial Sequence: Synthetic oligonucleotide"
  source 1..27: mol_type = other DNA
caacaatattatagtactccgtggacg

SEQ ID NO: 2600 - DNA, 27 bp, synthetic construct
  misc_feature 1..27: note = source = /note="Description of Artificial Sequence: Synthetic oligonucleotide"
  source 1..27: mol_type = other DNA
caacaatattatagtactccgtggacg

SEQ ID NO: 2601 - DNA, 27 bp, synthetic construct
  misc_feature 1..27: note = source = /note="Description of Artificial Sequence: Synthetic oligonucleotide"
  source 1..27: mol_type = other DNA
caacaatattatagtactccgtggacg

SEQ ID NO: 2602 - DNA, 27 bp, synthetic construct
  misc_feature 1..27: note = source = /note="Description of Artificial Sequence: Synthetic oligonucleotide"
  source 1..27: mol_type = other DNA
caacaatattatagtactccgtggacg

SEQ ID NO: 2603 - DNA, 27 bp, synthetic construct
  misc_feature 1..27: note = source = /note="Description of Artificial Sequence: Synthetic oligonucleotide"
  source 1..27: mol_type = other DNA
caacaatattatagtactccgtggacg

SEQ ID NO: 2604 - DNA, 27 bp, synthetic construct
  misc_feature 1..27: note = source = /note="Description of Artificial Sequence: Synthetic oligonucleotide"
  source 1..27: mol_type = other DNA
caacaatattatagtactccgtggacg

SEQ ID NO: 2605 - DNA, 27 bp, synthetic construct
  misc_feature 1..27: note = source = /note="Description of Artificial Sequence: Synthetic oligonucleotide"
  source 1..27: mol_type = other DNA
caacaatattatagtactccgtggacg

SEQ ID NO: 2606 - DNA, 27 bp, synthetic construct
  misc_feature 1..27: note = source = /note="Description of Artificial Sequence: Synthetic oligonucleotide"
  source 1..27: mol_type = other DNA
caacaatattatagtactccgtggacg

SEQ ID NO: 2607 - DNA, 27 bp, synthetic construct
  misc_feature 1..27: note = source = /note="Description of Artificial Sequence: Synthetic oligonucleotide"
  source 1..27: mol_type = other DNA
caacaatattatagtactccgtggacg

SEQ ID NO: 2608 - DNA, 27 bp, synthetic construct
  misc_feature 1..27: note = source = /note="Description of Artificial Sequence: Synthetic oligonucleotide"
  source 1..27: mol_type = other DNA
caacaatattatagtactccgtggacg

SEQ ID NO: 2609 - DNA, 27 bp, synthetic construct
  misc_feature 1..27: note = source = /note="Description of Artificial Sequence: Synthetic oligonucleotide"
  source 1..27: mol_type = other DNA
cagcaatattatcgtactccgtggacg

SEQ ID NO: 2610 - DNA, 27 bp, synthetic construct
  misc_feature 1..27: note = source = /note="Description of Artificial Sequence: Synthetic oligonucleotide"
  source 1..27: mol_type = other DNA
cagcaatattatcgtactccgtggacg

SEQ ID NO: 2611 - DNA, 27 bp, synthetic construct
  misc_feature 1..27: note = source = /note="Description of Artificial Sequence: Synthetic oligonucleotide"
  source 1..27: mol_type = other DNA
cagcaatattatcgtactccgtggacg

SEQ ID NO: 2612 - DNA, 27 bp, synthetic construct
  misc_feature 1..27: note = source = /note="Description of Artificial Sequence: Synthetic oligonucleotide"
  source 1..27: mol_type = other DNA
cagcaatattatcgtactccgtggacg

SEQ ID NO: 2613 - DNA, 27 bp, synthetic construct
  misc_feature 1..27: note = source = /note="Description of Artificial Sequence: Synthetic oligonucleotide"
  source 1..27: mol_type = other DNA
cagcaatattatcgtactccgtggacg

SEQ ID NO: 2614 - DNA, 27 bp, synthetic construct
  misc_feature 1..27: note = source = /note="Description of Artificial Sequence: Synthetic oligonucleotide"
  source 1..27: mol_type = other DNA
cagcaatattatcgtactccgtggacg

SEQ ID NO: 2615 - DNA, 27 bp, synthetic construct
  misc_feature 1..27: note = source = /note="Description of Artificial Sequence: Synthetic oligonucleotide"
  source 1..27: mol_type = other DNA
cagcaatattatcgtactccgtggacg

SEQ ID NO: 2616 - DNA, 27 bp, synthetic construct
  misc_feature 1..27: note = source = /note="Description of Artificial Sequence: Synthetic oligonucleotide"
  source 1..27: mol_type = other DNA
cagcaatattatcgtactccgtggacg

SEQ ID NO: 2617 - DNA, 27 bp, synthetic construct
  misc_feature 1..27: note = source = /note="Description of Artificial Sequence: Synthetic oligonucleotide"
  source 1..27: mol_type = other DNA
cagcaatattatcgtactccgtggacg

SEQ ID NO: 2618 - DNA, 27 bp, synthetic construct
  misc_feature 1..27: note = source = /note="Description of Artificial Sequence: Synthetic oligonucleotide"
  source 1..27: mol_type = other DNA
caacaatattatagtactccgtggacg

SEQ ID NO: 2619 - DNA, 27 bp, synthetic construct
  misc_feature 1..27: note = source = /note="Description of Artificial Sequence: Synthetic oligonucleotide"
  source 1..27: mol_type = other DNA
caacaatattatagtactccgtggacg

SEQ ID NO: 2620 - DNA, 27 bp, synthetic construct
  misc_feature 1..27: note = source = /note="Description of Artificial Sequence: Synthetic oligonucleotide"
  source 1..27: mol_type = other DNA
caacaatattatagtactccgtggacg

SEQ ID NO: 2621 - DNA, 27 bp, synthetic construct
  misc_feature 1..27: note = source = /note="Description of Artificial Sequence: Synthetic oligonucleotide"
  source 1..27: mol_type = other DNA
caacaatattatagtactccgtggacg

SEQ ID NO: 2622 - DNA, 27 bp, synthetic construct
  misc_feature 1..27: note = source = /note="Description of Artificial Sequence: Synthetic oligonucleotide"
  source 1..27: mol_type = other DNA
caacaatattatagtactccgtggacg

SEQ ID NO: 2623 - DNA, 27 bp, synthetic construct
  misc_feature 1..27: note = source = /note="Description of Artificial Sequence: Synthetic oligonucleotide"
  source 1..27: mol_type = other DNA
cagcaatattatcgtactccgtggacg

SEQ ID NO: 2624 - DNA, 27 bp, synthetic construct
  misc_feature 1..27: note = source = /note="Description of Artificial Sequence: Synthetic oligonucleotide"
  source 1..27: mol_type = other DNA
cagcaatattatcgtactccgtggacg

SEQ ID NO: 2625 - DNA, 27 bp, synthetic construct
  misc_feature 1..27: note = source = /note="Description of Artificial Sequence: Synthetic oligonucleotide"
  source 1..27: mol_type = other DNA
cagcaatattatcgtactccgtggacg

SEQ ID NO: 2626 - DNA, 27 bp, synthetic construct
  misc_feature 1..27: note = source = /note="Description of Artificial Sequence: Synthetic oligonucleotide"
  source 1..27: mol_type = other DNA
cagcaatattatcgtactccgtggacg

SEQ ID NO: 2627 - DNA, 27 bp, synthetic construct
  misc_feature 1..27: note = source = /note="Description of Artificial Sequence: Synthetic oligonucleotide"
  source 1..27: mol_type = other DNA
cagcaatattatcgtactccgtggacg

SEQ ID NO: 2628 - DNA, 27 bp, synthetic construct
  misc_feature 1..27: note = source = /note="Description of Artificial Sequence: Synthetic oligonucleotide"
  source 1..27: mol_type = other DNA
cagcaatattatcgtactccgtggacg

SEQ ID NO: 2629 - DNA, 27 bp, synthetic construct
  misc_feature 1..27: note = source = /note="Description of Artificial Sequence: Synthetic oligonucleotide"
  source 1..27: mol_type = other DNA
cagcaatattatcgtactccgtggacg

SEQ ID NO: 2630 - DNA, 27 bp, synthetic construct
  misc_feature 1..27: note = source = /note="Description of Artificial Sequence: Synthetic oligonucleotide"
  source 1..27: mol_type = other DNA
cagcaatattatcgtactccgtggacg

SEQ ID NO: 2631 - DNA, 27 bp, synthetic construct
  misc_feature 1..27: note = source = /note="Description of Artificial Sequence: Synthetic oligonucleotide"
  source 1..27: mol_type = other DNA
cagcaatattatcgtactccgtggacg

SEQ ID NO: 2632 - DNA, 27 bp, synthetic construct
  misc_feature 1..27: note = source = /note="Description of Artificial Sequence: Synthetic oligonucleotide"
  source 1..27: mol_type = other DNA
cagcaatattatcgtactccgtggacg

SEQ ID NO: 2633 - DNA, 27 bp, synthetic construct
  misc_feature 1..27: note = source = /note="Description of Artificial Sequence: Synthetic oligonucleotide"
  source 1..27: mol_type = other DNA
cagcaatattatcgtactccgtggacg

SEQ ID NO: 2634 - DNA, 27 bp, synthetic construct
  misc_feature 1..27: note = source = /note="Description of Artificial Sequence: Synthetic oligonucleotide"
  source 1..27: mol_type = other DNA
cagcaatattatcgtactccgtggacg

SEQ ID NO: 2635 - DNA, 27 bp, synthetic construct
  misc_feature 1..27: note = source = /note="Description of Artificial Sequence: Synthetic oligonucleotide"
  source 1..27: mol_type = other DNA
cagcaatattatcgtactccgtggacg

SEQ ID NO: 2636 - DNA, 33 bp, synthetic construct
  misc_feature 1..33: note = source = /note="Description of Artificial Sequence: Synthetic oligonucleotide"
  source 1..33: mol_type = other DNA
gcaacattcgatgaaagcctgagtggtccggta

SEQ ID NO: 2637 - DNA, 33 bp, synthetic construct
  misc_feature 1..33: note = source = /note="Description of Artificial Sequence: Synthetic oligonucleotide"
  source 1..33: mol_type = other DNA
gcaacattcgatgaaagcctgcaaggtccggta

SEQ ID NO: 2638 - DNA, 33 bp, synthetic construct; identical to SEQ ID NO: 2636
  misc_feature 1..33: note = source = /note="Description of Artificial Sequence: Synthetic oligonucleotide"
  source 1..33: mol_type = other DNA

SEQ ID NO: 2639 - DNA, 33 bp, synthetic construct; identical to SEQ ID NO: 2637
  misc_feature 1..33: note = source = /note="Description of Artificial Sequence: Synthetic oligonucleotide"
  source 1..33: mol_type = other DNA

SEQ ID NO: 2640 - DNA, 33 bp, synthetic construct; identical to SEQ ID NO: 2513
  misc_feature 1..33: note = source = /note="Description of Artificial Sequence: Synthetic oligonucleotide"
  source 1..33: mol_type = other DNA

SEQ ID NO: 2641 - DNA, 33 bp, synthetic construct; identical to SEQ ID NO: 2513
  misc_feature 1..33: note = source = /note="Description of Artificial Sequence: Synthetic oligonucleotide"
  source 1..33: mol_type = other DNA

SEQ ID NO: 2642 - DNA, 33 bp, synthetic construct
  misc_feature 1..33: note = source = /note="Description of Artificial Sequence: Synthetic oligonucleotide"
  source 1..33: mol_type = other DNA
gcaacattcgatgaaagcctgaatggtccggta

SEQ ID NO: 2643 - DNA, 33 bp, synthetic construct
  misc_feature 1..33: note = source = /note="Description of Artificial Sequence: Synthetic oligonucleotide"
  source 1..33: mol_type = other DNA
gcaacattcgatgacagcctgcaaggtccggta

SEQ ID NO: 2644 - DNA, 33 bp, synthetic construct
  misc_feature 1..33: note = source = /note="Description of Artificial Sequence: Synthetic oligonucleotide"
  source 1..33: mol_type = other DNA
gcaacattcgatgacagcctgagtggtccggta

SEQ ID NO: 2645 - DNA, 33 bp, synthetic construct
  misc_feature 1..33: note = source = /note="Description of Artificial Sequence: Synthetic oligonucleotide"
  source 1..33: mol_type = other DNA
gcaacattcgatgacagcctgaatgctccggta

SEQ ID NO: 2646 - DNA, 33 bp, synthetic construct
  misc_feature 1..33: note = source = /note="Description of Artificial Sequence: Synthetic oligonucleotide"
  source 1..33: mol_type = other DNA
gcaacattcgatagcagcctgaatggtccggta

SEQ ID NO: 2647 - DNA, 33 bp, synthetic construct
  misc_feature 1..33: note = source = /note="Description of Artificial Sequence: Synthetic oligonucleotide"
  source 1..33: mol_type = other DNA
gcaacattcgatagcagcctgaatgctccggta

SEQ ID NO: 2648 - DNA, 33 bp, synthetic construct; identical to SEQ ID NO: 2647
  misc_feature 1..33: note = source = /note="Description of Artificial Sequence: Synthetic oligonucleotide"
  source 1..33: mol_type = other DNA

SEQ ID NO: 2649 - DNA, 33 bp, synthetic construct; identical to SEQ ID NO: 2636
  misc_feature 1..33: note = source = /note="Description of Artificial Sequence: Synthetic oligonucleotide"
  source 1..33: mol_type = other DNA

SEQ ID NO: 2650 - DNA, 27 bp, synthetic construct
  misc_feature 1..27: note = source = /note="Description of Artificial Sequence: Synthetic oligonucleotide"
  source 1..27: mol_type = other DNA
ctacagcataataattaccccttcact

SEQ ID NO: 2651 - DNA, 27 bp, synthetic construct
  misc_feature 1..27: note = source = /note="Description of Artificial Sequence: Synthetic oligonucleotide"
  source 1..27: mol_type = other DNA
ctacagcataataattaccccttcact

SEQ ID NO: 2652 - DNA, 33 bp, synthetic construct
  misc_feature 1..33: note = source = /note="Description of Artificial Sequence: Synthetic oligonucleotide"
  source 1..33: mol_type = other DNA
gcaacattcgatagcagcctgagtggtccggta

SEQ ID NO: 2653 - DNA, 27 bp, synthetic construct
  misc_feature 1..27: note = source = /note="Description of Artificial Sequence: Synthetic oligonucleotide"
  source 1..27: mol_type = other DNA
caacagagttacagtaccctgatcagt

SEQ ID NO: 2654 - DNA, 33 bp, synthetic construct
  misc_feature 1..33: note = source = /note="Description of Artificial Sequence: Synthetic oligonucleotide"
  source 1..33: mol_type = other DNA
ggaacatgggatagcagcctgagtgctgtggta

SEQ ID NO: 2655 - DNA, 27 bp, synthetic construct
  misc_feature 1..27: note = source = /note="Description of Artificial Sequence: Synthetic oligonucleotide"
  source 1..27: mol_type = other DNA
caacagagttacagtaccctgatcagt

SEQ ID NO: 2656 - DNA, 27 bp, synthetic construct
  misc_feature 1..27: note = source = /note="Description of Artificial Sequence: Synthetic oligonucleotide"
  source 1..27: mol_type = other DNA
caacagagttacagtaccctgatcagt

SEQ ID NO: 2657 - DNA, 27 bp, synthetic construct
  misc_feature 1..27: note = source = /note="Description of Artificial Sequence: Synthetic oligonucleotide"
  source 1..27: mol_type = other DNA
caacagagttacagtaccctgatcagt

SEQ ID NO: 2658 - DNA, 27 bp, synthetic construct
  misc_feature 1..27: note = source = /note="Description of Artificial Sequence: Synthetic oligonucleotide"
  source 1..27: mol_type = other DNA
caacagagttacagtaccctgatcagt

SEQ ID NO: 2659 - DNA, 27 bp, synthetic construct
  misc_feature 1..27: note = source = /note="Description of Artificial Sequence: Synthetic oligonucleotide"
  source 1..27: mol_type = other DNA
caacagagttacagtaccctgatcagt

SEQ ID NO: 2660 - DNA, 27 bp, synthetic construct
  misc_feature 1..27: note = source = /note="Description of Artificial Sequence: Synthetic oligonucleotide"
  source 1..27: mol_type = other DNA
caacagagttacagtaccctgatcagt

SEQ ID NO: 2661 - DNA, 33 bp, synthetic construct; identical to SEQ ID NO: 2654
  misc_feature 1..33: note = source = /note="Description of Artificial Sequence: Synthetic oligonucleotide"
  source 1..33: mol_type = other DNA

SEQ ID NO: 2662 - DNA, 33 bp, synthetic construct; identical to SEQ ID NO: 2654
  misc_feature 1..33: note = source = /note="Description of Artificial Sequence: Synthetic oligonucleotide"
  source 1..33: mol_type = other DNA

SEQ ID NO: 2663 - DNA, 33 bp, synthetic construct; identical to SEQ ID NO: 2654
  misc_feature 1..33: note = source = /note="Description of Artificial Sequence: Synthetic oligonucleotide"
  source 1..33: mol_type = other DNA

SEQ ID NO: 2664 - DNA, 33 bp, synthetic construct
  misc_feature 1..33: note = source = /note="Description of Artificial Sequence: Synthetic oligonucleotide"
  source 1..33: mol_type = other DNA
ggaacattcgaaagcagcctgagtgctgtggta

SEQ ID NO: 2665 - DNA, 33 bp, synthetic construct; identical to SEQ ID NO: 2654
  misc_feature 1..33: note = source = /note="Description of Artificial Sequence: Synthetic oligonucleotide"
  source 1..33: mol_type = other DNA

SEQ ID NO: 2666 - DNA, 33 bp, synthetic construct; identical to SEQ ID NO: 2654
  misc_feature 1..33: note = source = /note="Description of Artificial Sequence: Synthetic oligonucleotide"
  source 1..33: mol_type = other DNA

SEQ ID NO: 2667 - DNA, 33 bp, synthetic construct; identical to SEQ ID NO: 2654
  misc_feature 1..33: note = source = /note="Description of Artificial Sequence: Synthetic oligonucleotide"
  source 1..33: mol_type = other DNA

SEQ ID NO: 2668 - DNA, 33 bp, synthetic construct; identical to SEQ ID NO: 2664
  misc_feature 1..33: note = source = /note="Description of Artificial Sequence: Synthetic oligonucleotide"
  source 1..33: mol_type = other DNA

SEQ ID NO: 2669 - DNA, 27 bp, synthetic construct
  misc_feature 1..27: note = source = /note="Description of Artificial Sequence: Synthetic oligonucleotide"
  source 1..27: mol_type = other DNA
caacagagttacagtaccctgctcagt

SEQ ID NO: 2670 - DNA, 15 bp, synthetic construct
  misc_feature 1..15: note = source = /note="Description of Artificial Sequence: Synthetic oligonucleotide"
  source 1..15: mol_type = other DNA
ggctactatatgcat

SEQ ID NO: 2671 - DNA, 15 bp, synthetic construct
  misc_feature 1..15: note = source = /note="Description of Artificial Sequence: Synthetic oligonucleotide"
  source 1..15: mol_type = other DNA
aactttggcatgcac

SEQ ID NO: 2672 - DNA, 15 bp, synthetic construct
  misc_feature 1..15: note = source = /note="Description of Artificial Sequence: Synthetic oligonucleotide"
  source 1..15: mol_type = other DNA
tactttggcatgcac

SEQ ID NO: 2673 - DNA, 15 bp, synthetic construct
  misc_feature 1..15: note = source = /note="Description of Artificial Sequence: Synthetic oligonucleotide"
  source 1..15: mol_type = other DNA
agctatggcatgcac

SEQ ID NO: 2674 - DNA, 15 bp, synthetic construct
  misc_feature 1..15: note = source = /note="Description of Artificial Sequence: Synthetic oligonucleotide"
  source 1..15: mol_type = other DNA
ggctactatatccac

SEQ ID NO: 2675 - DNA, 15 bp, synthetic construct
  misc_feature 1..15: note = source = /note="Description of Artificial Sequence: Synthetic oligonucleotide"
  source 1..15: mol_type = other DNA
ggctactatatccac

SEQ ID NO: 2676 - DNA, 15 bp, synthetic construct
  misc_feature 1..15: note = source = /note="Description of Artificial Sequence: Synthetic oligonucleotide"
  source 1..15: mol_type = other DNA
ggctactatatacac

SEQ ID NO: 2677 - DNA, 15 bp, synthetic construct
  misc_feature 1..15: note = source = /note="Description of Artificial Sequence: Synthetic oligonucleotide"
  source 1..15: mol_type = other DNA
ggctactatatacac

SEQ ID NO: 2678 - DNA, 21 bp, synthetic construct
  misc_feature 1..21: note = source = /note="Description of Artificial Sequence: Synthetic oligonucleotide"
  source 1..21: mol_type = other DNA
agtggtggttactactggagc

SEQ ID NO: 2679 - DNA, 15 bp, synthetic construct
  misc_feature 1..15: note = source = /note="Description of Artificial Sequence: Synthetic oligonucleotide"
  source 1..15: mol_type = other DNA
aactatggcatgcac

SEQ ID NO: 2680 - DNA, 15 bp, synthetic construct
  misc_feature 1..15: note = source = /note="Description of Artificial Sequence: Synthetic oligonucleotide"
  source 1..15: mol_type = other DNA
tactttggcatgcac

SEQ ID NO: 2681 - DNA, 15 bp, synthetic construct
  misc_feature 1..15: note = source = /note="Description of Artificial Sequence: Synthetic oligonucleotide"
  source 1..15: mol_type = other DNA
agctatggcatgcac

SEQ ID NO: 2682 - DNA, 15 bp, synthetic construct
  misc_feature 1..15: note = source = /note="Description of Artificial Sequence: Synthetic oligonucleotide"
  source 1..15: mol_type = other DNA
agttactactggagc

SEQ ID NO: 2683 - DNA, 15 bp, synthetic construct
  misc_feature 1..15: note = source = /note="Description of Artificial Sequence: Synthetic oligonucleotide"
  source 1..15: mol_type = other DNA
agttactactggagc

SEQ ID NO: 2684 - DNA, 15 bp, synthetic construct
  misc_feature 1..15: note = source = /note="Description of Artificial Sequence: Synthetic oligonucleotide"
  source 1..15: mol_type = other DNA
tactttggcatgcac

SEQ ID NO: 2685 - DNA, 15 bp, synthetic construct
  misc_feature 1..15: note = source = /note="Description of Artificial Sequence: Synthetic oligonucleotide"
  source 1..15: mol_type = other DNA
tactttggcatgcac

SEQ ID NO: 2686 - DNA, 15 bp, synthetic construct
  misc_feature 1..15: note = source = /note="Description of Artificial Sequence: Synthetic oligonucleotide"
  source 1..15: mol_type = other DNA
tactttggcatgcac

SEQ ID NO: 2687 - DNA, 15 bp, synthetic construct
  misc_feature 1..15: note = source = /note="Description of Artificial Sequence: Synthetic oligonucleotide"
  source 1..15: mol_type = other DNA
tactttggcatgcac

SEQ ID NO: 2688 - DNA, 15 bp, synthetic construct
  misc_feature 1..15: note = source = /note="Description of Artificial Sequence: Synthetic oligonucleotide"
  source 1..15: mol_type = other DNA
tactttggcatgcac

SEQ ID NO: 2689 - DNA, 15 bp, synthetic construct
  misc_feature 1..15: note = source = /note="Description of Artificial Sequence: Synthetic oligonucleotide"
  source 1..15: mol_type = other DNA
tactttggcatgcac

SEQ ID NO: 2690 - DNA, 15 bp, synthetic construct
  misc_feature 1..15: note = source = /note="Description of Artificial Sequence: Synthetic oligonucleotide"
  source 1..15: mol_type = other DNA
aactttggcatgcac

SEQ ID NO: 2691 - DNA, 15 bp, synthetic construct
  misc_feature 1..15: note = source = /note="Description of Artificial Sequence: Synthetic oligonucleotide"
  source 1..15: mol_type = other DNA
aactttggcatgcac

SEQ ID NO: 2692 - DNA, 15 bp, synthetic construct
  misc_feature 1..15: note = source = /note="Description of Artificial Sequence: Synthetic oligonucleotide"
  source 1..15: mol_type = other DNA
aactttggcatgcac

SEQ ID NO: 2693 - DNA, 15 bp, synthetic construct
  misc_feature 1..15: note = source = /note="Description of Artificial Sequence: Synthetic oligonucleotide"
  source 1..15: mol_type = other DNA
aactttggcatgcac

SEQ ID NO: 2694 - DNA, 15 bp, synthetic construct
  misc_feature 1..15: note = source = /note="Description of Artificial Sequence: Synthetic oligonucleotide"
  source 1..15: mol_type = other DNA
aactttggcatgcac

SEQ ID NO: 2695 - DNA, 15 bp, synthetic construct
  misc_feature 1..15: note = source = /note="Description of Artificial Sequence: Synthetic oligonucleotide"
  source 1..15: mol_type = other DNA
aactttggcatgcac

SEQ ID NO: 2696 - DNA, 15 bp, synthetic construct
  misc_feature 1..15: note = source = /note="Description of Artificial Sequence: Synthetic oligonucleotide"
  source 1..15: mol_type = other DNA
aactttggcatgcac

SEQ ID NO: 2697 - DNA, 15 bp, synthetic construct
  misc_feature 1..15: note = source = /note="Description of Artificial Sequence: Synthetic oligonucleotide"
  source 1..15: mol_type = other DNA
aactttggcatgcac

SEQ ID NO: 2698 - DNA, 15 bp, synthetic construct
  misc_feature 1..15: note = source = /note="Description of Artificial Sequence: Synthetic oligonucleotide"
  source 1..15: mol_type = other DNA
aactttggcatgcac

SEQ ID NO: 2699 - DNA, 15 bp, synthetic construct
  misc_feature 1..15: note = source = /note="Description of Artificial Sequence: Synthetic oligonucleotide"
  source 1..15: mol_type = other DNA
aactttggcatgcac

SEQ ID NO: 2700 - DNA, 15 bp, synthetic construct
  misc_feature 1..15: note = source = /note="Description of Artificial Sequence: Synthetic oligonucleotide"
  source 1..15: mol_type = other DNA
aactttggcatgcac

SEQ ID NO: 2701 - DNA, 15 bp, synthetic construct
  misc_feature 1..15: note = source = /note="Description of Artificial Sequence: Synthetic oligonucleotide"
  source 1..15: mol_type = other DNA
aactttggcatgcac

SEQ ID NO: 2702 - DNA, 15 bp, synthetic construct
  misc_feature 1..15: note = source = /note="Description of Artificial Sequence: Synthetic oligonucleotide"
  source 1..15: mol_type = other DNA
aactttggcatgcac

SEQ ID NO: 2703 - DNA, 15 bp, synthetic construct
  misc_feature 1..15: note = source = /note="Description of Artificial Sequence: Synthetic oligonucleotide"
  source 1..15: mol_type = other DNA
aactttggcatgcac

SEQ ID NO: 2704 - DNA, 15 bp, synthetic construct
  misc_feature 1..15: note = source = /note="Description of Artificial Sequence: Synthetic oligonucleotide"
  source 1..15: mol_type = other DNA
aactttggcatgcac

SEQ ID NO: 2705 - DNA, 15 bp, synthetic construct
  misc_feature 1..15: note = source = /note="Description of Artificial Sequence: Synthetic oligonucleotide"
  source 1..15: mol_type = other DNA
aactttggcatgcac

SEQ ID NO: 2706 - DNA, 15 bp, synthetic construct
  misc_feature 1..15: note = source = /note="Description of Artificial Sequence: Synthetic oligonucleotide"
  source 1..15: mol_type = other DNA
aactttggcatgcac

SEQ ID NO: 2707 - DNA, 15 bp, synthetic construct
  misc_feature 1..15: note = source = /note="Description of Artificial Sequence: Synthetic oligonucleotide"
  source 1..15: mol_type = other DNA
aactttggcatgcac

SEQ ID NO: 2708 - DNA, 15 bp, synthetic construct
  misc_feature 1..15: note = source = /note="Description of Artificial Sequence: Synthetic oligonucleotide"
  source 1..15: mol_type = other DNA
aactttggcatgcac

SEQ ID NO: 2709 - DNA, 15 bp, synthetic construct
  misc_feature 1..15: note = source = /note="Description of Artificial Sequence: Synthetic oligonucleotide"
  source 1..15: mol_type = other DNA
agctatggcatgcac

SEQ ID NO: 2710 - DNA, 15 bp, synthetic construct
  misc_feature 1..15: note = source = /note="Description of Artificial Sequence: Synthetic oligonucleotide"
  source 1..15: mol_type = other DNA
agctatggcatgcac

SEQ ID NO: 2711 - DNA, 15 bp, synthetic construct
  misc_feature 1..15: note = source = /note="Description of Artificial Sequence: Synthetic oligonucleotide"
  source 1..15: mol_type = other DNA
agctatggcatgcac

SEQ ID NO: 2712 - DNA, 15 bp, synthetic construct
  misc_feature 1..15: note = source = /note="Description of Artificial Sequence: Synthetic oligonucleotide"
  source 1..15: mol_type = other DNA
agctatggcatgcac

SEQ ID NO: 2713 - DNA, 15 bp, synthetic construct
  misc_feature 1..15: note = source = /note="Description of Artificial Sequence: Synthetic oligonucleotide"
  source 1..15: mol_type = other DNA
agctatggcatgcac

SEQ ID NO: 2714 - DNA, 15 bp, synthetic construct
  misc_feature 1..15: note = source = /note="Description of Artificial Sequence: Synthetic oligonucleotide"
  source 1..15: mol_type = other DNA
agctatggcatgcac

SEQ ID NO: 2715 - DNA, 15 bp, synthetic construct
  misc_feature 1..15: note = source = /note="Description of Artificial Sequence: Synthetic oligonucleotide"
  source 1..15: mol_type = other DNA
agctatggcatgcac

SEQ ID NO: 2716 - DNA, 15 bp, synthetic construct
  misc_feature 1..15: note = source = /note="Description of Artificial Sequence: Synthetic oligonucleotide"
  source 1..15: mol_type = other DNA
agctatggcatgcac

SEQ ID NO: 2717 - DNA, 15 bp, synthetic construct
  misc_feature 1..15: note = source = /note="Description of Artificial Sequence: Synthetic oligonucleotide"
  source 1..15: mol_type = other DNA
agctatggcatgcac

SEQ ID NO: 2718 - DNA, 15 bp, synthetic construct
  misc_feature 1..15: note = source = /note="Description of Artificial Sequence: Synthetic oligonucleotide"
  source 1..15: mol_type = other DNA
tactttggcatgcac

SEQ ID NO: 2719 - DNA, 15 bp, synthetic construct
  misc_feature 1..15: note = source = /note="Description of Artificial Sequence: Synthetic oligonucleotide"
  source 1..15: mol_type = other DNA
tactttggcatgcac

SEQ ID NO: 2720 - DNA, 15 bp, synthetic construct
  misc_feature 1..15: note = source = /note="Description of Artificial Sequence: Synthetic oligonucleotide"
  source 1..15: mol_type = other DNA
tactttggcatgcac

SEQ ID NO: 2721 - DNA, 15 bp, synthetic construct
  misc_feature 1..15: note = source = /note="Description of Artificial Sequence: Synthetic oligonucleotide"
  source 1..15: mol_type = other DNA
tactttggcatgcac

SEQ ID NO: 2722 - DNA, 15 bp, synthetic construct
  misc_feature 1..15: note = source = /note="Description of Artificial Sequence: Synthetic oligonucleotide"
  source 1..15: mol_type = other DNA
tactttggcatgcac

SEQ ID NO: 2723 - DNA, 15 bp, synthetic construct
  misc_feature 1..15: note = source = /note="Description of Artificial Sequence: Synthetic oligonucleotide"
  source 1..15: mol_type = other DNA
tactttggcatgcac

SEQ ID NO: 2724 - DNA, 15 bp, synthetic construct
  misc_feature 1..15: note = source = /note="Description of Artificial Sequence: Synthetic oligonucleotide"
  source 1..15: mol_type = other DNA
tactttggcatgcac

SEQ ID NO: 2725 - DNA, 15 bp, synthetic construct
  misc_feature 1..15: note = source = /note="Description of Artificial Sequence: Synthetic oligonucleotide"
  source 1..15: mol_type = other DNA
agctatggcatgcac

SEQ ID NO: 2726 - DNA, 15 bp, synthetic construct
  misc_feature 1..15: note = source = /note="Description of Artificial Sequence: Synthetic oligonucleotide"
  source 1..15: mol_type = other DNA
agctatggcatgcac

SEQ ID NO: 2727 - DNA, 15 bp, synthetic construct
  misc_feature 1..15: note = source = /note="Description of Artificial Sequence: Synthetic oligonucleotide"
  source 1..15: mol_type = other DNA
agctatggcatgcac

SEQ ID NO: 2728 - DNA, 15 bp, synthetic construct
  misc_feature 1..15: note = source = /note="Description of Artificial Sequence: Synthetic oligonucleotide"
  source 1..15: mol_type = other DNA
agctatggcatgcac

SEQ ID NO: 2729 - DNA, 15 bp, synthetic construct
  misc_feature 1..15: note = source = /note="Description of Artificial Sequence: Synthetic oligonucleotide"
  source 1..15: mol_type = other DNA
agctatggcatgcac

SEQ ID NO: 2730 - DNA, 15 bp, synthetic construct
  misc_feature 1..15: note = source = /note="Description of Artificial Sequence: Synthetic oligonucleotide"
  source 1..15: mol_type = other DNA
agctatggcatgcac

SEQ ID NO: 2731 - DNA, 15 bp, synthetic construct
  misc_feature 1..15: note = source = /note="Description of Artificial Sequence: Synthetic oligonucleotide"
  source 1..15: mol_type = other DNA
agctatggcatgcac

SEQ ID NO: 2732 - DNA, 15 bp, synthetic construct
  misc_feature 1..15: note = source = /note="Description of Artificial Sequence: Synthetic oligonucleotide"
  source 1..15: mol_type = other DNA
agctatggcatgcac

SEQ ID NO: 2733 - DNA, 15 bp, synthetic construct
  misc_feature 1..15: note = source = /note="Description of Artificial Sequence: Synthetic oligonucleotide"
  source 1..15: mol_type = other DNA
agctatggcatgcac

SEQ ID NO: 2734 - DNA, 15 bp, synthetic construct
  misc_feature 1..15: note = source = /note="Description of Artificial Sequence: Synthetic oligonucleotide"
  source 1..15: mol_type = other DNA
agctatggcatgcac

SEQ ID NO: 2735 - DNA, 15 bp, synthetic construct
  misc_feature 1..15: note = source = /note="Description of Artificial Sequence: Synthetic oligonucleotide"
  source 1..15: mol_type = other DNA
agctatggcatgcac

SEQ ID NO: 2736 - DNA, 15 bp, synthetic construct
  misc_feature 1..15: note = source = /note="Description of Artificial Sequence: Synthetic oligonucleotide"
  source 1..15: mol_type = other DNA
agctatggcatgcac

SEQ ID NO: 2737 - DNA, 15 bp, synthetic construct
  misc_feature 1..15: note = source = /note="Description of Artificial Sequence: Synthetic oligonucleotide"
  source 1..15: mol_type = other DNA
agctatggcatgcac

SEQ ID NO: 2738 - DNA, 15 bp, synthetic construct
  misc_feature 1..15: note = source = /note="Description of Artificial Sequence: Synthetic oligonucleotide"
  source 1..15: mol_type = other DNA
agctatggcatgcac

SEQ ID NO: 2739 - DNA, 15 bp, synthetic construct
  misc_feature 1..15: note = source = /note="Description of Artificial Sequence: Synthetic oligonucleotide"
  source 1..15: mol_type = other DNA
agctatggcatgcac

SEQ ID NO: 2740 - DNA, 15 bp, synthetic construct
  misc_feature 1..15: note = source = /note="Description of Artificial Sequence: Synthetic oligonucleotide"
  source 1..15: mol_type = other DNA
aactatggcatgcac

SEQ ID NO: 2741 - DNA, 15 bp, synthetic construct
  misc_feature 1..15: note = source = /note="Description of Artificial Sequence: Synthetic oligonucleotide"
  source 1..15: mol_type = other DNA
aactatggcatgcac

SEQ ID NO: 2742 - DNA, 15 bp, synthetic construct
  misc_feature 1..15: note = source = /note="Description of Artificial Sequence: Synthetic oligonucleotide"
  source 1..15: mol_type = other DNA
aactatggcatgcac

SEQ ID NO: 2743 - DNA, 15 bp, synthetic construct
  misc_feature 1..15: note = source = /note="Description of Artificial Sequence: Synthetic oligonucleotide"
  source 1..15: mol_type = other DNA
aactatggcatgcac

SEQ ID NO: 2744 - DNA, 15 bp, synthetic construct
  misc_feature 1..15: note = source = /note="Description of Artificial Sequence: Synthetic oligonucleotide"
  source 1..15: mol_type = other DNA
aactatggcatgcac

SEQ ID NO: 2745 - DNA, 15 bp, synthetic construct
  misc_feature 1..15: note = source = /note="Description of Artificial Sequence: Synthetic oligonucleotide"
  source 1..15: mol_type = other DNA
aactatggcatgcac

SEQ ID NO: 2746 - DNA, 15 bp, synthetic construct
  misc_feature 1..15: note = source = /note="Description of Artificial Sequence: Synthetic oligonucleotide"
  source 1..15: mol_type = other DNA
aactatggcatgcac

SEQ ID NO: 2747 - DNA, 15 bp, synthetic construct
  misc_feature 1..15: note = source = /note="Description of Artificial Sequence: Synthetic oligonucleotide"
  source 1..15: mol_type = other DNA
aactatggcatgcac

SEQ ID NO: 2748 - DNA, 21 bp, synthetic construct
  misc_feature 1..21: note = source = /note="Description of Artificial Sequence: Synthetic oligonucleotide"
  source 1..21: mol_type = other DNA
agtggtggttactactggagc

SEQ ID NO: 2749 - DNA, 21 bp, synthetic construct
  misc_feature 1..21: note = source = /note="Description of Artificial Sequence: Synthetic oligonucleotide"
  source 1..21: mol_type = other DNA
agtggtggttactactggagc

SEQ ID NO: 2750 - DNA, 21 bp, synthetic construct
  misc_feature 1..21: note = source = /note="Description of Artificial Sequence: Synthetic oligonucleotide"
  source 1..21: mol_type = other DNA
agtggtggttactactggagc

SEQ ID NO: 2751 - DNA, 21 bp, synthetic construct
  misc_feature 1..21: note = source = /note="Description of Artificial Sequence: Synthetic oligonucleotide"
  source 1..21: mol_type = other DNA
agtggtggttactactggagc

SEQ ID NO: 2752 - DNA, 21 bp, synthetic construct
  misc_feature 1..21: note = source = /note="Description of Artificial Sequence: Synthetic oligonucleotide"
  source 1..21: mol_type = other DNA
agtggtggttactactggagc

SEQ ID NO: 2753 - DNA, 21 bp, synthetic construct
  misc_feature 1..21: note = source = /note="Description of Artificial Sequence: Synthetic oligonucleotide"
  source 1..21: mol_type = other DNA
agtggtggttactactggagc

SEQ ID NO: 2754 - DNA, 21 bp, synthetic construct
  misc_feature 1..21: note = source = /note="Description of Artificial Sequence: Synthetic oligonucleotide"
  source 1..21: mol_type = other DNA
agtggtggttactactggagc

SEQ ID NO: 2755 - DNA, 15 bp, synthetic construct
  misc_feature 1..15: note = source = /note="Description of Artificial Sequence: Synthetic oligonucleotide"
  source 1..15: mol_type = other DNA
ggctactatatccac

SEQ ID NO: 2756 - DNA, 15 bp, synthetic construct
  misc_feature 1..15: note = source = /note="Description of Artificial Sequence: Synthetic oligonucleotide"
  source 1..15: mol_type = other DNA
ggctactatatccac

SEQ ID NO: 2757 - DNA, 15 bp, synthetic construct
  misc_feature 1..15: note = source = /note="Description of Artificial Sequence: Synthetic oligonucleotide"
  source 1..15: mol_type = other DNA
ggctactatatccac

SEQ ID NO: 2758 - DNA, 15 bp, synthetic construct
  misc_feature 1..15: note = source = /note="Description of Artificial Sequence: Synthetic oligonucleotide"
  source 1..15: mol_type = other DNA
ggctactatatccac

SEQ ID NO: 2759 - DNA, 15 bp, synthetic construct
  misc_feature 1..15: note = source = /note="Description of Artificial Sequence: Synthetic oligonucleotide"
  source 1..15: mol_type = other DNA
ggctactatatccac

SEQ ID NO: 2760 - DNA, 15 bp, synthetic construct
  misc_feature 1..15: note = source = /note="Description of Artificial Sequence: Synthetic oligonucleotide"
  source 1..15: mol_type = other DNA
ggctactatatccac

SEQ ID NO: 2761 - DNA, 15 bp, synthetic construct
  misc_feature 1..15: note = source = /note="Description of Artificial Sequence: Synthetic oligonucleotide"
  source 1..15: mol_type = other DNA
ggctactatatccac

SEQ ID NO: 2762 - DNA, 15 bp, synthetic construct
  misc_feature 1..15: note = source = /note="Description of Artificial Sequence: Synthetic oligonucleotide"
  source 1..15: mol_type = other DNA
ggctactatatccac

SEQ ID NO: 2763 - DNA, 15 bp, synthetic construct
  misc_feature 1..15: note = source = /note="Description of Artificial Sequence: Synthetic oligonucleotide"
  source 1..15: mol_type = other DNA
ggctactatatccac

SEQ ID NO: 2764 - DNA, 15 bp, synthetic construct
  misc_feature 1..15: note = source = /note="Description of Artificial Sequence: Synthetic oligonucleotide"
  source 1..15: mol_type = other DNA
ggctactatatccac

SEQ ID NO: 2765 - DNA, 15 bp, synthetic construct
  misc_feature 1..15: note = source = /note="Description of Artificial Sequence: Synthetic oligonucleotide"
  source 1..15: mol_type = other DNA
ggctactatatccac

SEQ ID NO: 2766 - DNA, 15 bp, synthetic construct
  misc_feature 1..15: note = source = /note="Description of Artificial Sequence: Synthetic oligonucleotide"
  source 1..15: mol_type = other DNA
ggctactatatacac

SEQ ID NO: 2767 - DNA, 15 bp, synthetic construct
  misc_feature 1..15: note = source = /note="Description of Artificial Sequence: Synthetic oligonucleotide"
  source 1..15: mol_type = other DNA
ggctactatatacac

SEQ ID NO: 2768 - DNA, 15 bp, synthetic construct
  misc_feature 1..15: note = source = /note="Description of Artificial Sequence: Synthetic oligonucleotide"
  source 1..15: mol_type = other DNA
ggctactatatacac

SEQ ID NO: 2769 - DNA, 15 bp, synthetic construct
  misc_feature 1..15: note = source = /note="Description of Artificial Sequence: Synthetic oligonucleotide"
  source 1..15: mol_type = other DNA
ggctactatatacac

SEQ ID NO: 2770 - DNA, 15 bp, synthetic construct
  misc_feature 1..15: note = source = /note="Description of Artificial Sequence: Synthetic oligonucleotide"
  source 1..15: mol_type = other DNA
ggctactatatacac

SEQ ID NO: 2771 - DNA, 15 bp, synthetic construct
  misc_feature 1..15: note = source = /note="Description of Artificial Sequence: Synthetic oligonucleotide"
  source 1..15: mol_type = other DNA
ggctactatatacac

SEQ ID NO: 2772 - DNA, 15 bp, synthetic construct
  misc_feature 1..15: note = source = /note="Description of Artificial Sequence: Synthetic oligonucleotide"
  source 1..15: mol_type = other DNA
ggctactatatacac

SEQ ID NO: 2773 - DNA, 15 bp, synthetic construct
  misc_feature 1..15: note = source = /note="Description of Artificial Sequence: Synthetic oligonucleotide"
  source 1..15: mol_type = other DNA
ggctactatatacac

SEQ ID NO: 2774 - DNA, 15 bp, synthetic construct
  misc_feature 1..15: note = source = /note="Description of Artificial Sequence: Synthetic oligonucleotide"
  source 1..15: mol_type = other DNA
ggctactatatacac

SEQ ID NO: 2775 - DNA, 15 bp, synthetic construct
  misc_feature 1..15: note = source = /note="Description of Artificial Sequence: Synthetic oligonucleotide"
  source 1..15: mol_type = other DNA
ggctactatatccac

SEQ ID NO: 2776 - DNA, 15 bp, synthetic construct
  misc_feature 1..15: note = source = /note="Description of Artificial Sequence: Synthetic oligonucleotide"
  source 1..15: mol_type = other DNA
ggctactatatccac

SEQ ID NO: 2777 - DNA, 15 bp, synthetic construct
  misc_feature 1..15: note = source = /note="Description of Artificial Sequence: Synthetic oligonucleotide"
  source 1..15: mol_type = other DNA
ggctactatatccac

SEQ ID NO: 2778 - DNA, 15 bp, synthetic construct
  misc_feature 1..15: note = source = /note="Description of Artificial Sequence: Synthetic oligonucleotide"
  source 1..15: mol_type = other DNA
ggctactatatccac

SEQ ID NO: 2779 - DNA, 15 bp, synthetic construct
  misc_feature 1..15: note = source = /note="Description of Artificial Sequence: Synthetic oligonucleotide"
  source 1..15: mol_type = other DNA
ggctactatatccac

SEQ ID NO: 2780 - DNA, 15 bp, synthetic construct
  misc_feature 1..15: note = source = /note="Description of Artificial Sequence: Synthetic oligonucleotide"
  source 1..15: mol_type = other DNA
ggctactatatacac

SEQ ID NO: 2781 - DNA, 15 bp, synthetic construct
  misc_feature 1..15: note = source = /note="Description of Artificial Sequence: Synthetic oligonucleotide"
  source 1..15: mol_type = other DNA
ggctactatatacac

SEQ ID NO: 2782 - DNA, 15 bp, synthetic construct
  misc_feature 1..15: note = source = /note="Description of Artificial Sequence: Synthetic oligonucleotide"
  source 1..15: mol_type = other DNA
ggctactatatacac

SEQ ID NO: 2783 - DNA, 15 bp, synthetic construct
  misc_feature 1..15: note = source = /note="Description of Artificial Sequence: Synthetic oligonucleotide"
  source 1..15: mol_type = other DNA
ggctactatatacac

SEQ ID NO: 2784 - DNA, 15 bp, synthetic construct
  misc_feature 1..15: note = source = /note="Description of Artificial Sequence: Synthetic oligonucleotide"
  source 1..15: mol_type = other DNA
ggctactatatacac

SEQ ID NO: 2785 - DNA, 15 bp, synthetic construct
  misc_feature 1..15: note = source = /note="Description of Artificial Sequence: Synthetic oligonucleotide"
  source 1..15: mol_type = other DNA
ggctactatatacac

SEQ ID NO: 2786 - DNA, 15 bp, synthetic construct
  misc_feature 1..15: note = source = /note="Description of Artificial Sequence: Synthetic oligonucleotide"
  source 1..15: mol_type = other DNA
ggctactatatacac

SEQ ID NO: 2787 - DNA, 15 bp, synthetic construct
  misc_feature 1..15: note = source = /note="Description of Artificial Sequence: Synthetic oligonucleotide"
  source 1..15: mol_type = other DNA
ggctactatatacac

SEQ ID NO: 2788 - DNA, 15 bp, synthetic construct
  misc_feature 1..15: note = source = /note="Description of Artificial Sequence: Synthetic oligonucleotide"
  source 1..15: mol_type = other DNA
ggctactatatacac

SEQ ID NO: 2789 - DNA, 15 bp, synthetic construct
  misc_feature 1..15: note = source = /note="Description of Artificial Sequence: Synthetic oligonucleotide"
  source 1..15: mol_type = other DNA
ggctactatatacac

SEQ ID NO: 2790 - DNA, 15 bp, synthetic construct
  misc_feature 1..15: note = source = /note="Description of Artificial Sequence: Synthetic oligonucleotide"
  source 1..15: mol_type = other DNA
ggctactatatacac

SEQ ID NO: 2791 - DNA, 15 bp, synthetic construct
  misc_feature 1..15: note = source = /note="Description of Artificial Sequence: Synthetic oligonucleotide"
  source 1..15: mol_type = other DNA
ggctactatatacac

SEQ ID NO: 2792 - DNA, 15 bp, synthetic construct
  misc_feature 1..15: note = source = /note="Description of Artificial Sequence: Synthetic oligonucleotide"
  source 1..15: mol_type = other DNA
ggctactatatacac

SEQ ID NO: 2793 - DNA, 15 bp, synthetic construct
  misc_feature 1..15: note = source = /note="Description of Artificial Sequence: Synthetic oligonucleotide"
  source 1..15: mol_type = other DNA
ggctactatatgcat

SEQ ID NO: 2794 - DNA, 15 bp, synthetic construct
  misc_feature 1..15: note = source = /note="Description of Artificial Sequence: Synthetic oligonucleotide"
  source 1..15: mol_type = other DNA
ggctactatatgcat

SEQ ID NO: 2795 - DNA, 15 bp, synthetic construct
  misc_feature 1..15: note = source = /note="Description of Artificial Sequence: Synthetic oligonucleotide"
  source 1..15: mol_type = other DNA
ggctactatatgcat

SEQ ID NO: 2796 - DNA, 15 bp, synthetic construct
  misc_feature 1..15: note = source = /note="Description of Artificial Sequence: Synthetic oligonucleotide"
  source 1..15: mol_type = other DNA
ggctactatatgcat

SEQ ID NO: 2797 - DNA, 15 bp, synthetic construct
  misc_feature 1..15: note = source = /note="Description of Artificial Sequence: Synthetic oligonucleotide"
  source 1..15: mol_type = other DNA
ggctactatatgcat

SEQ ID NO: 2798 - DNA, 15 bp, synthetic construct
  misc_feature 1..15: note = source = /note="Description of Artificial Sequence: Synthetic oligonucleotide"
  source 1..15: mol_type = other DNA
ggctactatatgcat

SEQ ID NO: 2799 - DNA, 15 bp, synthetic construct
  misc_feature 1..15: note = source = /note="Description of Artificial Sequence: Synthetic oligonucleotide"
  source 1..15: mol_type = other DNA
ggctactatatgcat

SEQ ID NO: 2800 - DNA, 15 bp, synthetic construct
  misc_feature 1..15: note = source = /note="Description of Artificial Sequence: Synthetic oligonucleotide"
  source 1..15: mol_type = other DNA
ggctactatatgcat

SEQ ID NO: 2801 - DNA, 15 bp, synthetic construct
  misc_feature 1..15: note = source = /note="Description of Artificial Sequence: Synthetic oligonucleotide"
  source 1..15: mol_type = other DNA
ggctactatatgcat

SEQ ID NO: 2802 - DNA, 15 bp, synthetic construct
  misc_feature 1..15: note = source = /note="Description of Artificial Sequence: Synthetic oligonucleotide"
  source 1..15: mol_type = other DNA
ggctactatatgcat

SEQ ID NO: 2803 - DNA, 15 bp, synthetic construct
  misc_feature 1..15: note = source = /note="Description of Artificial Sequence: Synthetic oligonucleotide"
  source 1..15: mol_type = other DNA
ggctactatatgcat

SEQ ID NO: 2804 - DNA, 15 bp, synthetic construct
  misc_feature 1..15: note = source = /note="Description of Artificial Sequence: Synthetic oligonucleotide"
  source 1..15: mol_type = other DNA
ggctactatatgcat

SEQ ID NO: 2805 - DNA, 15 bp, synthetic construct
  misc_feature 1..15: note = source = /note="Description of Artificial Sequence: Synthetic oligonucleotide"
  source 1..15: mol_type = other DNA
ggctactatatgcat

SEQ ID NO: 2806 - DNA, 15 bp, synthetic construct
  misc_feature 1..15: note = source = /note="Description of Artificial Sequence: Synthetic oligonucleotide"
  source 1..15: mol_type = other DNA
ggctactatatgcat

SEQ ID NO: 2807 - DNA, 15 bp, synthetic construct
  misc_feature 1..15: note = source = /note="Description of Artificial Sequence: Synthetic oligonucleotide"
  source 1..15: mol_type = other DNA
aactttggcatgcac

SEQ ID NO: 2808 - DNA, 15 bp, synthetic construct
  misc_feature 1..15: note = source = /note="Description of Artificial Sequence: Synthetic oligonucleotide"
  source 1..15: mol_type = other DNA
tactttggcatgcac

SEQ ID NO: 2809 - DNA, 15 bp, synthetic construct
  misc_feature 1..15: note = source = /note="Description of Artificial Sequence: Synthetic oligonucleotide"
  source 1..15: mol_type = other DNA
ggctactatatgcat

SEQ ID NO: 2810 - DNA, 15 bp, synthetic construct
  misc_feature 1..15: note = source = /note="Description of Artificial Sequence: Synthetic oligonucleotide"
  source 1..15: mol_type = other DNA
agctatggcatacac

SEQ ID NO: 2811 - DNA, 15 bp, synthetic construct
  misc_feature 1..15: note = source = /note="Description of Artificial Sequence: Synthetic oligonucleotide"
  source 1..15: mol_type = other DNA
agttatgatatcaac

SEQ ID NO: 2812 - DNA, 15 bp, synthetic construct
  misc_feature 1..15: note = source = /note="Description of Artificial Sequence: Synthetic oligonucleotide"
  source 1..15: mol_type = other DNA
agctatggcatacac

SEQ ID NO: 2813 - DNA, 15 bp, synthetic construct
  misc_feature 1..15: note = source = /note="Description of Artificial Sequence: Synthetic oligonucleotide"
  source 1..15: mol_type = other DNA
agctatggcatacac

SEQ ID NO: 2814 - DNA, 15 bp, synthetic construct
  misc_feature 1..15: note = source = /note="Description of Artificial Sequence: Synthetic oligonucleotide"
  source 1..15: mol_type = other DNA
agctatggcatacac

SEQ ID NO: 2815 - DNA, 15 bp, synthetic construct
  misc_feature 1..15: note = source = /note="Description of Artificial Sequence: Synthetic oligonucleotide"
  source 1..15: mol_type = other DNA
agctatggcatacac

SEQ ID NO: 2816 - DNA, 15 bp, synthetic construct
  misc_feature 1..15: note = source = /note="Description of Artificial Sequence: Synthetic oligonucleotide"
  source 1..15: mol_type = other DNA
agctatggcatacac

SEQ ID NO: 2817 - DNA, 15 bp, synthetic construct
  misc_feature 1..15: note = source = /note="Description of Artificial Sequence: Synthetic oligonucleotide"
  source 1..15: mol_type = other DNA
agctatggcatacac

SEQ ID NO: 2818 - DNA, 15 bp, synthetic construct
  misc_feature 1..15: note = source = /note="Description of Artificial Sequence: Synthetic oligonucleotide"
  source 1..15: mol_type = other DNA
agttatgatatcaac

SEQ ID NO: 2819 - DNA, 15 bp, synthetic construct
  misc_feature 1..15: note = source = /note="Description of Artificial Sequence: Synthetic oligonucleotide"
  source 1..15: mol_type = other DNA
agttatgatatcaac

SEQ ID NO: 2820 - DNA, 15 bp, synthetic construct
  misc_feature 1..15: note = source = /note="Description of Artificial Sequence: Synthetic oligonucleotide"
  source 1..15: mol_type = other DNA
agttatgatatcaac

SEQ ID NO: 2821 - DNA, 15 bp, synthetic construct
  misc_feature 1..15: note = source = /note="Description of Artificial Sequence: Synthetic oligonucleotide"
  source 1..15: mol_type = other DNA
agttatgatatcaac

SEQ ID NO: 2822 - DNA, 15 bp, synthetic construct
  misc_feature 1..15: note = source = /note="Description of Artificial Sequence: Synthetic oligonucleotide"
  source 1..15: mol_type = other DNA
agttatgatatcaac

SEQ ID NO: 2823 - DNA, 15 bp, synthetic construct
  misc_feature 1..15: note = source = /note="Description of Artificial Sequence: Synthetic oligonucleotide"
  source 1..15: mol_type = other DNA
agttatgatatcaac

SEQ ID NO: 2824 - DNA, 15 bp, synthetic construct
  misc_feature 1..15: note = source = /note="Description of Artificial Sequence: Synthetic oligonucleotide"
  source 1..15: mol_type = other DNA
agttatgatatcaac

SEQ ID NO: 2825 - DNA, 15 bp, synthetic construct
  misc_feature 1..15: note = source = /note="Description of Artificial Sequence: Synthetic oligonucleotide"
  source 1..15: mol_type = other DNA
agttatgatatcaac

SEQ ID NO: 2826 - DNA, 15 bp, synthetic construct
  misc_feature 1..15: note = source = /note="Description of Artificial Sequence: Synthetic oligonucleotide"
  source 1..15: mol_type = other DNA
agctatggcatacac

SEQ ID NO: 2827 - DNA, 51 bp, synthetic construct
  misc_feature 1..51: note = source = /note="Description of Artificial Sequence: Synthetic oligonucleotide"
  source 1..51: mol_type = other DNA
tggatcaaccctaacagtggtggcacaaactatgcacagaagtttcagggc

SEQ ID NO: 2828 - DNA, 51 bp, synthetic construct
  misc_feature 1..51: note = source = /note="Description of Artificial Sequence: Synthetic oligonucleotide"
  source 1..51: mol_type = other DNA
gttatatggtatgatggaagtaatgaaaactatgcagactccgtgaagggc

SEQ ID NO: 2829 - DNA, 51 bp, synthetic construct
  misc_feature 1..51: note = source = /note="Description of Artificial Sequence: Synthetic oligonucleotide"
  source 1..51: mol_type = other DNA
gttatatggtatgatggaagtaataaatactatgcagactccgtgaagggc

SEQ ID NO: 2830 - DNA, 51 bp, synthetic construct; identical to SEQ ID NO: 2829
  misc_feature 1..51: note = source = /note="Description of Artificial Sequence: Synthetic oligonucleotide"
  source 1..51: mol_type = other DNA

SEQ ID NO: 2831 - DNA, 51 bp, synthetic construct
  misc_feature 1..51: note = source = /note="Description of Artificial Sequence: Synthetic oligonucleotide"
  source 1..51: mol_type = other DNA
tggatcaaccctgacagtggtggcacagactattcacagaggtttcagggc

SEQ ID NO: 2832 - DNA, 51 bp, synthetic construct; identical to SEQ ID NO: 2831
  misc_feature 1..51: note = source = /note="Description of Artificial Sequence: Synthetic oligonucleotide"
  source 1..51: mol_type = other DNA

SEQ ID NO: 2833 - DNA, 51 bp, synthetic construct
  misc_feature 1..51: note = source = /note="Description of Artificial Sequence: Synthetic oligonucleotide"
  source 1..51: mol_type = other DNA
tggatcagccctaacagtggtgacacaagctatgcacagaagtttcaggac

SEQ ID NO: 2834 - DNA, 51 bp, synthetic construct
  misc_feature 1..51: note = source = /note="Description of Artificial Sequence: Synthetic oligonucleotide"
  source 1..51: mol_type = other DNA
tggataagccctaacaatggtgacacaaactatgcacagaagtttcaggac

SEQ ID NO: 2835 - DNA, 48 bp, synthetic construct
  misc_feature 1..48: note = source = /note="Description of Artificial Sequence: Synthetic oligonucleotide"
  source 1..48: mol_type = other DNA
tacatctattacagtgggagcacctactacaacccgtccctcaagagt

SEQ ID NO: 2836 - DNA, 51 bp, synthetic construct
  misc_feature 1..51: note = source = /note="Description of Artificial Sequence: Synthetic oligonucleotide"
  source 1..51: mol_type = other DNA
gctatatggtttgatggaagtgataaatactatgcagactccgtgaagggc

SEQ ID NO: 2837 - DNA, 51 bp, synthetic construct; identical to SEQ ID NO: 2829
  misc_feature 1..51: note = source = /note="Description of Artificial Sequence: Synthetic oligonucleotide"
  source 1..51: mol_type = other DNA

SEQ ID NO: 2838 - DNA, 51 bp, synthetic construct
  misc_feature 1..51: note = source = /note="Description of Artificial Sequence: Synthetic oligonucleotide"
  source 1..51: mol_type = other DNA
gctatatggtatgatggaaataataaatactatgcagactccgtgaagggc

SEQ ID NO: 2839 - DNA, 48 bp, synthetic construct
  misc_feature 1..48: note = source = /note="Description of Artificial Sequence: Synthetic oligonucleotide"
  source 1..48: mol_type = other DNA
cgtatctataccagtgggagcaccaactacaacccctccctcaagagt

SEQ ID NO: 2840 - DNA, 48 bp, synthetic construct; identical to SEQ ID NO: 2839
  misc_feature 1..48: note = source = /note="Description of Artificial Sequence: Synthetic oligonucleotide"
  source 1..48: mol_type = other DNA

SEQ ID NO: 2841 - DNA, 51 bp, synthetic construct
  misc_feature 1..51: note = source = /note="Description of Artificial Sequence: Synthetic oligonucleotide"
  source 1..51: mol_type = other DNA
gttatatggtatgatgcaagtaataaatactatgcagacgccgtgaagggc

SEQ ID NO: 2842 - DNA, 51 bp, synthetic construct
  misc_feature 1..51: note = source = /note="Description of Artificial Sequence: Synthetic oligonucleotide"
  source 1..51: mol_type = other DNA
gttatatggtatgatgcaagtaataaatactatgcagactccgtgaagggc

SEQ ID NO: 2843 - DNA, 51 bp, synthetic construct
  misc_feature 1..51: note = source = /note="Description of Artificial Sequence: Synthetic oligonucleotide"
  source 1..51: mol_type = other DNA
gttatatggtatgatggaagtaataaatactatgcagacgccgtgaagggc

SEQ ID NO: 2844 - DNA, 51 bp, synthetic construct; identical to SEQ ID NO: 2841
  misc_feature 1..51: note = source = /note="Description of Artificial Sequence: Synthetic oligonucleotide"
  source 1..51: mol_type = other DNA

SEQ ID NO: 2845 - DNA, 51 bp, synthetic construct; identical to SEQ ID NO: 2841
  misc_feature 1..51: note = source = /note="Description of Artificial Sequence: Synthetic oligonucleotide"
  source 1..51: mol_type = other DNA

SEQ ID NO: 2846 - DNA, 51 bp, synthetic construct; identical to SEQ ID NO: 2841
  misc_feature 1..51: note = source = /note="Description of Artificial Sequence: Synthetic oligonucleotide"
  source 1..51: mol_type = other DNA

SEQ ID NO: 2847 - DNA, 51 bp, synthetic construct
  misc_feature 1..51: note = source = /note="Description of Artificial Sequence: Synthetic oligonucleotide"
  source 1..51: mol_type = other DNA
gttatatggtatgatgcaagtaatgaaaactatgcagacgccgtgaagggc

SEQ ID NO: 2848 - DNA, 51 bp, synthetic construct; identical to SEQ ID NO: 2847
  misc_feature 1..51: note = source = /note="Description of Artificial Sequence: Synthetic oligonucleotide"
  source 1..51: mol_type = other DNA

SEQ ID NO: 2849 - DNA, 51 bp, synthetic construct; identical to SEQ ID NO: 2847
  misc_feature 1..51: note = source = /note="Description of Artificial Sequence: Synthetic oligonucleotide"
  source 1..51: mol_type = other DNA

SEQ ID NO: 2850 - DNA, 51 bp, synthetic construct
  misc_feature 1..51: note = source = /note="Description of Artificial Sequence: Synthetic oligonucleotide"
  source 1..51: mol_type = other DNA
gttatatggtatgatgcaagtaatgaaaactatgcagactccgtgaagggc

SEQ ID NO: 2851 - DNA, 51 bp, synthetic construct
  misc_feature 1..51: note = source = /note="Description of Artificial Sequence: Synthetic oligonucleotide"
  source 1..51: mol_type = other DNA
gttatatggtatgatggaagtaatgaaaactatgcagacgccgtgaagggc

SEQ ID NO: 2852 - DNA, 51 bp, synthetic construct; identical to SEQ ID NO: 2847
  misc_feature 1..51: note = source = /note="Description of Artificial Sequence: Synthetic oligonucleotide"
  source 1..51: mol_type = other DNA

SEQ ID NO: 2853 - DNA, 51 bp, synthetic construct; identical to SEQ ID NO: 2847
  misc_feature 1..51: note = source = /note="Description of Artificial Sequence: Synthetic oligonucleotide"
  source 1..51: mol_type = other DNA

SEQ ID NO: 2854 - DNA, 51 bp, synthetic construct; identical to SEQ ID NO: 2828
  misc_feature 1..51: note = source = /note="Description of Artificial Sequence: Synthetic oligonucleotide"
  source 1..51: mol_type = other DNA

SEQ ID NO: 2855 - DNA, 51 bp, synthetic construct; identical to SEQ ID NO: 2847
  misc_feature 1..51: note = source = /note="Description of Artificial Sequence: Synthetic oligonucleotide"
  source 1..51: mol_type = other DNA

SEQ ID NO: 2856 - DNA, 51 bp, synthetic construct; identical to SEQ ID NO: 2847
  misc_feature 1..51: note = source = /note="Description of Artificial Sequence: Synthetic oligonucleotide"
  source 1..51: mol_type = other DNA

SEQ ID NO: 2857 - DNA, 51 bp, synthetic construct; identical to SEQ ID NO: 2847
  misc_feature 1..51: note = source = /note="Description of Artificial Sequence: Synthetic oligonucleotide"
  source 1..51: mol_type = other DNA

SEQ ID NO: 2858 - DNA, 51 bp, synthetic construct; identical to SEQ ID NO: 2847
  misc_feature 1..51: note = source = /note="Description of Artificial Sequence: Synthetic oligonucleotide"
  source 1..51: mol_type = other DNA

SEQ ID NO: 2859 - DNA, 51 bp, synthetic construct; identical to SEQ ID NO: 2847
  misc_feature 1..51: note = source = /note="Description of Artificial Sequence: Synthetic oligonucleotide"
  source 1..51: mol_type = other DNA

SEQ ID NO: 2860 - DNA, 51 bp, synthetic construct; identical to SEQ ID NO: 2847
  misc_feature 1..51: note = source = /note="Description of Artificial Sequence: Synthetic oligonucleotide"
  source 1..51: mol_type = other DNA

SEQ ID NO: 2861 - DNA, 51 bp, synthetic construct; identical to SEQ ID NO: 2847
  misc_feature 1..51: note = source = /note="Description of Artificial Sequence: Synthetic oligonucleotide"
  source 1..51: mol_type = other DNA

SEQ ID NO: 2862 - DNA, 51 bp, synthetic construct; identical to SEQ ID NO: 2851
  misc_feature 1..51: note = source = /note="Description of Artificial Sequence: Synthetic oligonucleotide"
  source 1..51: mol_type = other DNA

SEQ ID NO: 2863 - DNA, 51 bp, synthetic construct; identical to SEQ ID NO: 2850
  misc_feature 1..51: note = source = /note="Description of Artificial Sequence: Synthetic oligonucleotide"
  source 1..51: mol_type = other DNA

SEQ ID NO: 2864 - DNA, 51 bp, synthetic construct; identical to SEQ ID NO: 2847
  misc_feature 1..51: note = source = /note="Description of Artificial Sequence: Synthetic oligonucleotide"
  source 1..51: mol_type = other DNA

SEQ ID NO: 2865 - DNA, 51 bp, synthetic construct; identical to SEQ ID NO: 2847
  misc_feature 1..51: note = source = /note="Description of Artificial Sequence: Synthetic oligonucleotide"
  source 1..51: mol_type = other DNA

SEQ ID NO: 2866 - DNA, 51 bp, synthetic construct; identical to SEQ ID NO: 2841
  misc_feature 1..51: note = source = /note="Description of Artificial Sequence: Synthetic oligonucleotide"
  source 1..51: mol_type = other DNA

SEQ ID NO: 2867 - DNA, 51 bp, synthetic construct; identical to SEQ ID NO: 2841
  misc_feature 1..51: note = source = /note="Description of Artificial Sequence: Synthetic oligonucleotide"
  source 1..51: mol_type = other DNA

SEQ ID NO: 2868 - DNA, 51 bp, synthetic construct; identical to SEQ ID NO: 2841
  misc_feature 1..51: note = source = /note="Description of Artificial Sequence: Synthetic oligonucleotide"
  source 1..51: mol_type = other DNA

SEQ ID NO: 2869 - DNA, 51 bp, synthetic construct; identical to SEQ ID NO: 2841
  misc_feature 1..51: note = source = /note="Description of Artificial Sequence: Synthetic oligonucleotide"
  source 1..51: mol_type = other DNA

SEQ ID NO: 2870 - DNA, 51 bp, synthetic construct; identical to SEQ ID NO: 2841
  misc_feature 1..51: note = source = /note="Description of Artificial Sequence: Synthetic oligonucleotide"
  source 1..51: mol_type = other DNA

SEQ ID NO: 2871 - DNA, 51 bp, synthetic construct; identical to SEQ ID NO: 2841
  misc_feature 1..51: note = source = /note="Description of Artificial Sequence: Synthetic oligonucleotide"
  source 1..51: mol_type = other DNA

SEQ ID NO: 2872 - DNA, 51 bp, synthetic construct; identical to SEQ ID NO: 2841
  misc_feature 1..51: note = source = /note="Description of Artificial Sequence: Synthetic oligonucleotide"
  source 1..51: mol_type = other DNA

SEQ ID NO: 2873 - DNA, 51 bp, synthetic construct; identical to SEQ ID NO: 2842
  misc_feature 1..51: note = source = /note="Description of Artificial Sequence: Synthetic oligonucleotide"
  source 1..51: mol_type = other DNA

SEQ ID NO: 2874 - DNA, 51 bp, synthetic construct; identical to SEQ ID NO: 2843
  misc_feature 1..51: note = source = /note="Description of Artificial Sequence: Synthetic oligonucleotide"
  source 1..51: mol_type = other DNA

SEQ ID NO: 2875 - DNA, 51 bp, synthetic construct; identical to SEQ ID NO: 2841
  misc_feature 1..51: note = source = /note="Description of Artificial Sequence: Synthetic oligonucleotide"
  source 1..51: mol_type = other DNA

SEQ ID NO: 2876 - DNA, 51 bp, synthetic construct; identical to SEQ ID NO: 2841
  misc_feature 1..51: note = source = /note="Description of Artificial Sequence: Synthetic oligonucleotide"
  source 1..51: mol_type = other DNA

SEQ ID NO: 2877 - DNA, 51 bp, synthetic construct; identical to SEQ ID NO: 2841
  misc_feature 1..51: note = source = /note="Description of Artificial Sequence: Synthetic oligonucleotide"
  source 1..51: mol_type = other DNA

SEQ ID NO: 2878 - DNA, 51 bp, synthetic construct; identical to SEQ ID NO: 2841
  misc_feature 1..51: note = source = /note="Description of Artificial Sequence: Synthetic oligonucleotide"
  source 1..51: mol_type = other DNA

SEQ ID NO: 2879 - DNA, 51 bp, synthetic construct; identical to SEQ ID NO: 2829
  misc_feature 1..51: note = source = /note="Description of Artificial Sequence: Synthetic oligonucleotide"
  source 1..51: mol_type = other DNA

SEQ ID NO: 2880 - DNA, 51 bp, synthetic construct; identical to SEQ ID NO: 2842
  misc_feature 1..51: note = source = /note="Description of Artificial Sequence: Synthetic oligonucleotide"
  source 1..51: mol_type = other DNA

SEQ ID NO: 2881 - DNA, 51 bp, synthetic construct; identical to SEQ ID NO: 2843
  misc_feature 1..51: note = source = /note="Description of Artificial Sequence: Synthetic oligonucleotide"
  source 1..51: mol_type = other DNA

SEQ ID NO: 2882 - DNA, 51 bp, synthetic construct
  misc_feature 1..51: note = source = /note="Description of Artificial Sequence: Synthetic oligonucleotide"
  source 1..51: mol_type = other DNA
gctatatggtatgatgcaaataataaatactatgcagacgccgtgaagggc

SEQ ID NO: 2883 - DNA, 51 bp, synthetic construct; identical to SEQ ID NO: 2882
  misc_feature 1..51: note = source = /note="Description of Artificial Sequence: Synthetic oligonucleotide"
  source 1..51: mol_type = other DNA

SEQ ID NO: 2884 - DNA, 51 bp, synthetic construct; identical to SEQ ID NO: 2882
  misc_feature 1..51: note = source = /note="Description of Artificial Sequence: Synthetic oligonucleotide"
  source 1..51: mol_type = other DNA

SEQ ID NO: 2885 - DNA, 51 bp, synthetic construct; identical to SEQ ID NO: 2882
  misc_feature 1..51: note = source = /note="Description of Artificial Sequence: Synthetic oligonucleotide"
  source 1..51: mol_type = other DNA

SEQ ID NO: 2886 - DNA, 51 bp, synthetic construct; identical to SEQ ID NO: 2882
  misc_feature 1..51: note = source = /note="Description of Artificial Sequence: Synthetic oligonucleotide"
  source 1..51: mol_type = other DNA

SEQ ID NO: 2887 - DNA, 51 bp, synthetic construct; identical to SEQ ID NO: 2882
  misc_feature 1..51: note = source = /note="Description of Artificial Sequence: Synthetic oligonucleotide"
  source 1..51: mol_type = other DNA

SEQ ID NO: 2888 - DNA, 51 bp, synthetic construct; identical to SEQ ID NO: 2882
  misc_feature 1..51: note = source = /note="Description of Artificial Sequence: Synthetic oligonucleotide"
  source 1..51: mol_type = other DNA

SEQ ID NO: 2889 - DNA, 51 bp, synthetic construct
  misc_feature 1..51: note = source = /note="Description of Artificial Sequence: Synthetic oligonucleotide"
  source 1..51: mol_type = other DNA
gctatatggtatgatggaaataataaatactatgcagacgccgtgaagggc

SEQ ID NO: 2890 - DNA, 51 bp, synthetic construct
  misc_feature 1..51: note = source = /note="Description of Artificial Sequence: Synthetic oligonucleotide"
  source 1..51: mol_type = other DNA
gctatatggtatgatgcaaataataaatactatgcagactccgtgaagggc

SEQ ID NO: 2891 - DNA, 51 bp, synthetic construct; identical to SEQ ID NO: 2882
  misc_feature 1..51: note = source = /note="Description of Artificial Sequence: Synthetic oligonucleotide"
  source 1..51: mol_type = other DNA

SEQ ID NO: 2892 - DNA, 51 bp, synthetic construct; identical to SEQ ID NO: 2882
  misc_feature 1..51: note = source = /note="Description of Artificial Sequence: Synthetic oligonucleotide"
  source 1..51: mol_type = other DNA

SEQ ID NO: 2893 - DNA, 51 bp, synthetic construct
  misc_feature 1..51: note = source = /note="Description of Artificial Sequence: Synthetic oligonucleotide"
  source 1..51: mol_type = other DNA
gttatatggtatgatgcaagtaataaatactatgaagacgccgtgaagggc

SEQ ID NO: 2894 - DNA, 51 bp, synthetic construct
  misc_feature 1..51: note = source = /note="Description of Artificial Sequence: Synthetic oligonucleotide"
  source 1..51: mol_type = other DNA
gttatatggtatgatggaagtaataaatactatgaagactccgtgaagggc

SEQ ID NO: 2895 - DNA, 51 bp, synthetic construct
  misc_feature 1..51: note = source = /note="Description of Artificial Sequence: Synthetic oligonucleotide"
  source 1..51: mol_type = other DNA
gttatatggtatgatggaagtaataaatactatgaagacgccgtgaagggc

SEQ ID NO: 2896 - DNA, 51 bp, synthetic construct
  misc_feature 1..51: note = source = /note="Description of Artificial Sequence: Synthetic oligonucleotide"
  source 1..51: mol_type = other DNA
gttatatggtatgatgcaagtaataaatactatgaagactccgtgaagggc

SEQ ID NO: 2897 - DNA, 51 bp, synthetic construct
  misc_feature 1..51: note = source = /note="Description of Artificial Sequence: Synthetic oligonucleotide"
  source 1..51: mol_type = other DNA
gctatatggtttgatgcaagtgataaatactatgcagacgccgtgaagggc

SEQ ID NO: 2898 - DNA, 51 bp, synthetic construct
  misc_feature 1..51: note = source = /note="Description of Artificial Sequence: Synthetic oligonucleotide"
  source 1..51: mol_type = other DNA
gctatatggtttgatgcaagtgataaatactatgcagactccgtgaagggc

SEQ ID NO: 2899 - DNA, 51 bp, synthetic construct
  misc_feature 1..51: note = source = /note="Description of Artificial Sequence: Synthetic oligonucleotide"
  source 1..51: mol_type = other DNA
gctatatggtttgatggaagtgataaatactatgcagacgccgtgaagggc

SEQ ID NO: 2900 - DNA, 51 bp, synthetic construct; identical to SEQ ID NO: 2897
  misc_feature 1..51: note = source = /note="Description of Artificial Sequence: Synthetic oligonucleotide"
  source 1..51: mol_type = other DNA

SEQ ID NO: 2901 - DNA, 51 bp, synthetic construct; identical to SEQ ID NO: 2897
  misc_feature 1..51: note = source = /note="Description of Artificial Sequence: Synthetic oligonucleotide"
  source 1..51: mol_type = other DNA

SEQ ID NO: 2902 - DNA, 51 bp, synthetic construct; identical to SEQ ID NO: 2897
  misc_feature 1..51: note = source = /note="Description of Artificial Sequence: Synthetic oligonucleotide"
  source 1..51: mol_type = other DNA

SEQ ID NO: 2903 - DNA, 51 bp, synthetic construct; identical to SEQ ID NO: 2897
  misc_feature 1..51: note = source = /note="Description of Artificial Sequence: Synthetic oligonucleotide"
  source 1..51: mol_type = other DNA

SEQ ID NO: 2904 - DNA, 51 bp, synthetic construct; identical to SEQ ID NO: 2897
  misc_feature 1..51: note = source = /note="Description of Artificial Sequence: Synthetic oligonucleotide"
  source 1..51: mol_type = other DNA

SEQ ID NO: 2905 - DNA, 48 bp, synthetic construct; identical to SEQ ID NO: 2835
  misc_feature 1..48: note = source = /note="Description of Artificial Sequence: Synthetic oligonucleotide"
  source 1..48: mol_type = other DNA

SEQ ID NO: 2906 - DNA, 48 bp, synthetic construct; identical to SEQ ID NO: 2835
  misc_feature 1..48: note = source = /note="Description of Artificial Sequence: Synthetic oligonucleotide"
  source 1..48: mol_type = other DNA

SEQ ID NO: 2907 - DNA, 48 bp, synthetic construct; identical to SEQ ID NO: 2835
  misc_feature 1..48: note = source = /note="Description of Artificial Sequence: Synthetic oligonucleotide"
  source 1..48: mol_type = other DNA

SEQ ID NO: 2908 - DNA, 48 bp, synthetic construct; identical to SEQ ID NO: 2835
  misc_feature 1..48: note = source = /note="Description of Artificial Sequence: Synthetic oligonucleotide"
  source 1..48: mol_type = other DNA

SEQ ID NO: 2909 - DNA, 48 bp, synthetic construct; identical to SEQ ID NO: 2835
  misc_feature 1..48: note = source = /note="Description of Artificial Sequence: Synthetic oligonucleotide"
  source 1..48: mol_type = other DNA

SEQ ID NO: 2910 - DNA, 48 bp, synthetic construct; identical to SEQ ID NO: 2835
  misc_feature 1..48: note = source = /note="Description of Artificial Sequence: Synthetic oligonucleotide"
  source 1..48: mol_type = other DNA

SEQ ID NO: 2911 - DNA, 48 bp, synthetic construct; identical to SEQ ID NO: 2835
  misc_feature 1..48: note = source = /note="Description of Artificial Sequence: Synthetic oligonucleotide"
  source 1..48: mol_type = other DNA

SEQ ID NO: 2912 - DNA, 51 bp, synthetic construct
  misc_feature 1..51: note = source = /note="Description of Artificial Sequence: Synthetic oligonucleotide"
  source 1..51: mol_type = other DNA
tggatcaaccctgaaagtggtggcacagactattcacagaggtttcagggc

SEQ ID NO: 2913 - DNA, 51 bp, synthetic construct; identical to SEQ ID NO: 2912
  misc_feature 1..51: note = source = /note="Description of Artificial Sequence: Synthetic oligonucleotide"
  source 1..51: mol_type = other DNA

SEQ ID NO: 2914 - DNA, 51 bp, synthetic construct
  misc_feature 1..51: note = source = /note="Description of Artificial Sequence: Synthetic oligonucleotide"
  source 1..51: mol_type = other DNA
tggatcaaccctgacgctggtggcacagactattcacagaggtttcagggc

SEQ ID NO: 2915 - DNA, 51 bp, synthetic construct; identical to SEQ ID NO: 2914
  misc_feature 1..51: note = source = /note="Description of Artificial Sequence: Synthetic oligonucleotide"
  source 1..51: mol_type = other DNA

SEQ ID NO: 2916 - DNA, 51 bp, synthetic construct; identical to SEQ ID NO: 2831
  misc_feature 1..51: note = source = /note="Description of Artificial Sequence: Synthetic oligonucleotide"
  source 1..51: mol_type = other DNA

SEQ ID NO: 2917 - DNA, 51 bp, synthetic construct; identical to SEQ ID NO: 2831
  misc_feature 1..51: note = source = /note="Description of Artificial Sequence: Synthetic oligonucleotide"
  source 1..51: mol_type = other DNA

SEQ ID NO: 2918 - DNA, 51 bp, synthetic construct; identical to SEQ ID NO: 2831
  misc_feature 1..51: note = source = /note="Description of Artificial Sequence: Synthetic oligonucleotide"
  source 1..51: mol_type = other DNA

SEQ ID NO: 2919 - DNA, 51 bp, synthetic construct; identical to SEQ ID NO: 2914
  misc_feature 1..51: note = source = /note="Description of Artificial Sequence: Synthetic oligonucleotide"
  source 1..51: mol_type = other DNA

SEQ ID NO: 2920 - DNA, 51 bp, synthetic construct; identical to SEQ ID NO: 2914
  misc_feature 1..51: note = source = /note="Description of Artificial Sequence: Synthetic oligonucleotide"
  source 1..51: mol_type = other DNA

SEQ ID NO: 2921 - DNA, 51 bp, synthetic construct; identical to SEQ ID NO: 2914
  misc_feature 1..51: note = source = /note="Description of Artificial Sequence: Synthetic oligonucleotide"
  source 1..51: mol_type = other DNA

SEQ ID NO: 2922 - DNA, 51 bp, synthetic construct; identical to SEQ ID NO: 2912
  misc_feature 1..51: note = source = /note="Description of Artificial Sequence: Synthetic oligonucleotide"
  source 1..51: mol_type = other DNA

SEQ ID NO: 2923 - DNA, 51 bp, synthetic construct
  misc_feature 1..51: note = source = /note="Description of Artificial Sequence: Synthetic oligonucleotide"
  source 1..51: mol_type = other DNA
tggatcagccctaacagtggtgaaacaagctatgcacagaagtttcaggac

SEQ ID NO: 2924 - DNA, 51 bp, synthetic construct; identical to SEQ ID NO: 2833
  misc_feature 1..51: note = source = /note="Description of Artificial Sequence: Synthetic oligonucleotide"
  source 1..51: mol_type = other DNA

SEQ ID NO: 2925 - DNA, 51 bp, synthetic construct; identical to SEQ ID NO: 2923
  misc_feature 1..51: note = source = /note="Description of Artificial Sequence: Synthetic oligonucleotide"
  source 1..51: mol_type = other DNA

SEQ ID NO: 2926 - DNA, 51 bp, synthetic construct; identical to SEQ ID NO: 2923
  misc_feature 1..51: note = source = /note="Description of Artificial Sequence: Synthetic oligonucleotide"
  source 1..51: mol_type = other DNA

SEQ ID NO: 2927 - DNA, 51 bp, synthetic construct; identical to SEQ ID NO: 2833
  misc_feature 1..51: note = source = /note="Description of Artificial Sequence: Synthetic oligonucleotide"
  source 1..51: mol_type = other DNA

SEQ ID NO: 2928 - DNA, 51 bp, synthetic construct; identical to SEQ ID NO: 2923
  misc_feature 1..51: note = source = /note="Description of Artificial Sequence: Synthetic oligonucleotide"
  source 1..51: mol_type = other DNA

SEQ ID NO: 2929 - DNA, 51 bp, synthetic construct; identical to SEQ ID NO: 2833
  misc_feature 1..51: note = source = /note="Description of Artificial Sequence: Synthetic oligonucleotide"
  source 1..51: mol_type = other DNA

SEQ ID NO: 2930 - DNA, 51 bp, synthetic construct; identical to SEQ ID NO: 2923
  misc_feature 1..51: note = source = /note="Description of Artificial Sequence: Synthetic oligonucleotide"
  source 1..51: mol_type = other DNA

SEQ ID NO: 2931 - DNA, 51 bp, synthetic construct; identical to SEQ ID NO: 2923
  misc_feature 1..51: note = source = /note="Description of Artificial Sequence: Synthetic oligonucleotide"
  source 1..51: mol_type = other DNA

SEQ ID NO: 2932 - DNA, 51 bp, synthetic construct; identical to SEQ ID NO: 2912
  misc_feature 1..51: note = source = /note="Description of Artificial Sequence: Synthetic oligonucleotide"
  source 1..51: mol_type = other DNA

SEQ ID NO: 2933 - DNA, 51 bp, synthetic construct; identical to SEQ ID NO: 2912
  misc_feature 1..51: note = source = /note="Description of Artificial Sequence: Synthetic oligonucleotide"
  source 1..51: mol_type = other DNA

SEQ ID NO: 2934 - DNA, 51 bp, synthetic construct; identical to SEQ ID NO: 2831
  misc_feature 1..51: note = source = /note="Description of Artificial Sequence: Synthetic oligonucleotide"
  source 1..51: mol_type = other DNA

SEQ ID NO: 2935 - DNA, 51 bp, synthetic construct; identical to SEQ ID NO: 2912
  misc_feature 1..51: note = source = /note="Description of Artificial Sequence: Synthetic oligonucleotide"
  source 1..51: mol_type = other DNA

SEQ ID NO: 2936 - DNA, 51 bp, synthetic construct; identical to SEQ ID NO: 2912
  misc_feature 1..51: note = source = /note="Description of Artificial Sequence: Synthetic oligonucleotide"
  source 1..51: mol_type = other DNA

SEQ ID NO: 2937 - DNA, 51 bp, synthetic construct
  misc_feature 1..51: note = source = /note="Description of Artificial Sequence: Synthetic oligonucleotide"
  source 1..51: mol_type = other DNA
tggataagccctaaccaaggtgaaacaaactatgcacagaagtttcaggac

SEQ ID NO: 2938 - DNA, 51 bp, synthetic construct
  misc_feature 1..51: note = source = /note="Description of Artificial Sequence: Synthetic oligonucleotide"
  source 1..51: mol_type = other DNA
tggataagccctaaccaaggtgacacaaactatgcacagaagtttcaggac

SEQ ID NO: 2939 - DNA, 51 bp, synthetic construct; identical to SEQ ID NO: 2937
  misc_feature 1..51: note = source = /note="Description of Artificial Sequence: Synthetic oligonucleotide"
  source 1..51: mol_type = other DNA

SEQ ID NO: 2940 - DNA, 51 bp, synthetic construct
  misc_feature 1..51: note = source = /note="Description of Artificial Sequence: Synthetic oligonucleotide"
  source 1..51: mol_type = other DNA
tggataagccctaacaatggtgaaacaaactatgcacagaagtttcaggac

SEQ ID NO: 2941 - DNA, 51 bp, synthetic construct; identical to SEQ ID NO: 2834
  misc_feature 1..51: note = source = /note="Description of Artificial Sequence: Synthetic oligonucleotide"
  source 1..51: mol_type = other DNA

SEQ ID NO: 2942 - DNA, 51 bp, synthetic construct; identical to SEQ ID NO: 2938
  misc_feature 1..51: note = source = /note="Description of Artificial Sequence: Synthetic oligonucleotide"
  source 1..51: mol_type = other DNA

SEQ ID NO: 2943 - DNA, 51 bp, synthetic construct; identical to SEQ ID NO: 2940
  misc_feature 1..51: note = source = /note="Description of Artificial Sequence: Synthetic oligonucleotide"
  source 1..51: mol_type = other DNA

SEQ ID NO: 2944 - DNA, 51 bp, synthetic construct; identical to SEQ ID NO: 2937
  misc_feature 1..51: note = source = /note="Description of Artificial Sequence: Synthetic oligonucleotide"
  source 1..51: mol_type = other DNA

SEQ ID NO: 2945 - DNA, 51 bp, synthetic construct; identical to SEQ ID NO: 2834
  misc_feature 1..51: note = source = /note="Description of Artificial Sequence: Synthetic oligonucleotide"
  source 1..51: mol_type = other DNA

SEQ ID NO: 2946 - DNA, 51 bp, synthetic construct; identical to SEQ ID NO: 2938
  misc_feature 1..51: note = source = /note="Description of Artificial Sequence: Synthetic oligonucleotide"
  source 1..51: mol_type = other DNA

SEQ ID NO: 2947 - DNA, 51 bp, synthetic construct; identical to SEQ ID NO: 2940
  misc_feature 1..51: note = source = /note="Description of Artificial Sequence: Synthetic oligonucleotide"
  source 1..51: mol_type = other DNA

SEQ ID NO: 2948 - DNA, 51 bp, synthetic construct; identical to SEQ ID NO: 2937
  misc_feature 1..51: note = source = /note="Description of Artificial Sequence: Synthetic oligonucleotide"
  source 1..51: mol_type = other DNA

SEQ ID NO: 2949 - DNA, 51 bp, synthetic construct; identical to SEQ ID NO: 2937
  misc_feature 1..51: note = source = /note="Description of Artificial Sequence: Synthetic oligonucleotide"
  source 1..51: mol_type = other DNA

SEQ ID NO: 2950 - DNA, 51 bp, synthetic construct; identical to SEQ ID NO: 2827
  misc_feature 1..51: note = source = /note="Description of Artificial Sequence: Synthetic oligonucleotide"
  source 1..51: mol_type = other DNA

SEQ ID NO: 2951 - DNA, 51 bp, synthetic construct; identical to SEQ ID NO: 2827
  misc_feature 1..51: note = source = /note="Description of Artificial Sequence: Synthetic oligonucleotide"
  source 1..51: mol_type = other DNA

SEQ ID NO: 2952 - DNA, 51 bp, synthetic construct; identical to SEQ ID NO: 2827
  misc_feature 1..51: note = source = /note="Description of Artificial Sequence: Synthetic oligonucleotide"
  source 1..51: mol_type = other DNA

SEQ ID NO: 2953 - DNA, 51 bp, synthetic construct; identical to SEQ ID NO: 2827
  misc_feature 1..51: note = source = /note="Description of Artificial Sequence: Synthetic oligonucleotide"
  source 1..51: mol_type = other DNA

SEQ ID NO: 2954 - DNA, 51 bp, synthetic construct; identical to SEQ ID NO: 2827
  misc_feature 1..51: note = source = /note="Description of Artificial Sequence: Synthetic oligonucleotide"
  source 1..51: mol_type = other DNA

SEQ ID NO: 2955 - DNA, 51 bp, synthetic construct; identical to SEQ ID NO: 2827
  misc_feature 1..51: note = source = /note="Description of Artificial Sequence: Synthetic oligonucleotide"
  source 1..51: mol_type = other DNA

SEQ ID NO: 2956 - DNA, 51 bp, synthetic construct; identical to SEQ ID NO: 2827
  misc_feature 1..51: note = source = /note="Description of Artificial Sequence: Synthetic oligonucleotide"
  source 1..51: mol_type = other DNA

SEQ ID NO: 2957 - DNA, 51 bp, synthetic construct; identical to SEQ ID NO: 2827
  misc_feature 1..51: note = source = /note="Description of Artificial Sequence: Synthetic oligonucleotide"
  source 1..51: mol_type = other DNA

SEQ ID NO: 2958 - DNA, 51 bp, synthetic construct; identical to SEQ ID NO: 2827
  misc_feature 1..51: note = source = /note="Description of Artificial Sequence: Synthetic oligonucleotide"
  source 1..51: mol_type = other DNA

SEQ ID NO: 2959 - DNA, 51 bp, synthetic construct; identical to SEQ ID NO: 2827
  misc_feature 1..51: note = source = /note="Description of Artificial Sequence: Synthetic oligonucleotide"
  source 1..51: mol_type = other DNA

SEQ ID NO: 2960 - DNA, 51 bp, synthetic construct; identical to SEQ ID NO: 2827
  misc_feature 1..51: note = source = /note="Description of Artificial Sequence: Synthetic oligonucleotide"
  source 1..51: mol_type = other DNA

SEQ ID NO: 2961 - DNA, 51 bp, synthetic construct; identical to SEQ ID NO: 2827
  misc_feature 1..51: note = source = /note="Description of Artificial Sequence: Synthetic oligonucleotide"
  source 1..51: mol_type = other DNA

SEQ ID NO: 2962 - DNA, 51 bp, synthetic construct; identical to SEQ ID NO: 2827
  misc_feature 1..51: note = source = /note="Description of Artificial Sequence: Synthetic oligonucleotide"
  source 1..51: mol_type = other DNA

SEQ ID NO: 2963 - DNA, 51 bp, synthetic construct; identical to SEQ ID NO: 2827
  misc_feature 1..51: note = source = /note="Description of Artificial Sequence: Synthetic oligonucleotide"
  source 1..51: mol_type = other DNA

SEQ ID NO: 2964 - DNA, 51 bp, synthetic construct; identical to SEQ ID NO: 2847
  misc_feature 1..51: note = source = /note="Description of Artificial Sequence: Synthetic oligonucleotide"
  source 1..51: mol_type = other DNA

SEQ ID NO: 2965 - DNA, 51 bp, synthetic construct; identical to SEQ ID NO: 2841
  misc_feature 1..51: note = source = /note="Description of Artificial Sequence: Synthetic oligonucleotide"
  source 1..51: mol_type = other DNA

SEQ ID NO: 2966 - DNA, 51 bp, synthetic construct; identical to SEQ ID NO: 2827
  misc_feature 1..51: note = source = /note="Description of Artificial Sequence: Synthetic oligonucleotide"
  source 1..51: mol_type = other DNA

SEQ ID NO: 2967 - DNA, 51 bp, synthetic construct
  misc_feature 1..51: note = source = /note="Description of Artificial Sequence: Synthetic oligonucleotide"
  source 1..51: mol_type = other DNA
gttatatggtatgatggaagtaataagttccatgcagactccgtgaagggc

SEQ ID NO: 2968 - DNA, 51 bp, synthetic construct
  misc_feature 1..51: note = source = /note="Description of Artificial Sequence: Synthetic oligonucleotide"
  source 1..51: mol_type = other DNA
tggatgaaccctaacagtggtaacacaggctatgcacagaagttccagggc

SEQ ID NO: 2969 - DNA, 51 bp, synthetic construct
  misc_feature 1..51: note = source = /note="Description of Artificial Sequence: Synthetic oligonucleotide"
  source 1..51: mol_type = other DNA
gttatatggtatgatgcaagtaataagttccatgcagacgccgtgaagggc

SEQ ID NO: 2970 - DNA, 51 bp, synthetic construct; identical to SEQ ID NO: 2969
  misc_feature 1..51: note = source = /note="Description of Artificial Sequence: Synthetic oligonucleotide"
  source 1..51: mol_type = other DNA

SEQ ID NO: 2971 - DNA, 51 bp, synthetic construct; identical to SEQ ID NO: 2969
  misc_feature 1..51: note = source = /note="Description of Artificial Sequence: Synthetic oligonucleotide"
  source 1..51: mol_type = other DNA

SEQ ID NO: 2972 - DNA, 51 bp, synthetic construct; identical to SEQ ID NO: 2969
  misc_feature 1..51: note = source = /note="Description of Artificial Sequence: Synthetic oligonucleotide"
  source 1..51: mol_type = other DNA

SEQ ID NO: 2973 - DNA, 51 bp, synthetic construct
  misc_feature 1..51: note = source = /note="Description of Artificial Sequence: Synthetic oligonucleotide"
  source 1..51: mol_type = other DNA
gttatatggtatgatgcaagtaataagttccatgcagactccgtgaagggc

SEQ ID NO: 2974 - DNA, 51 bp, synthetic construct
  misc_feature 1..51: note = source = /note="Description of Artificial Sequence: Synthetic oligonucleotide"
  source 1..51: mol_type = other DNA
gttatatggtatgatggaagtaataagttccatgcagacgccgtgaagggc

SEQ ID NO: 2975 - DNA, 51 bp, synthetic construct
  misc_feature 1..51: note = source = /note="Description of Artificial Sequence: Synthetic oligonucleotide"
  source 1..51: mol_type = other DNA
tggatgaaccctaacagtggtggcacaggctatgcacagaagttccagggc

SEQ ID NO: 2976 - DNA, 51 bp, synthetic construct; identical to SEQ ID NO: 2968
  misc_feature 1..51: note = source = /note="Description of Artificial Sequence: Synthetic oligonucleotide"
  source 1..51: mol_type = other DNA

SEQ ID NO: 2977 - DNA, 51 bp, synthetic construct; identical to SEQ ID NO: 2975
  misc_feature 1..51: note = source = /note="Description of Artificial Sequence: Synthetic oligonucleotide"
  source 1..51: mol_type = other DNA

SEQ ID NO: 2978 - DNA, 51 bp, synthetic construct; identical to SEQ ID NO: 2975
  misc_feature 1..51: note = source = /note="Description of Artificial Sequence: Synthetic oligonucleotide"
  source 1..51: mol_type = other DNA

SEQ ID NO: 2979 - DNA, 51 bp, synthetic construct; identical to SEQ ID NO: 2975
  misc_feature 1..51: note = source = /note="Description of Artificial Sequence: Synthetic oligonucleotide"
  source 1..51: mol_type = other DNA

SEQ ID NO: 2980 - DNA, 51 bp, synthetic construct; identical to SEQ ID NO: 2968
  misc_feature 1..51: note = source = /note="Description of Artificial Sequence: Synthetic oligonucleotide"
  source 1..51: mol_type = other DNA

SEQ ID NO: 2981 - DNA, 51 bp, synthetic construct; identical to SEQ ID NO: 2975
  misc_feature 1..51: note = source = /note="Description of Artificial Sequence: Synthetic oligonucleotide"
  source 1..51: mol_type = other DNA

SEQ ID NO: 2982 - DNA, 51 bp, synthetic construct; identical to SEQ ID NO: 2975
  misc_feature 1..51: note = source = /note="Description of Artificial Sequence: Synthetic oligonucleotide"
  source 1..51: mol_type = other DNA

SEQ ID NO: 2983 - DNA, 51 bp, synthetic construct; identical to SEQ ID NO: 2969
  misc_feature 1..51: note = source = /note="Description of Artificial Sequence: Synthetic oligonucleotide"
  source 1..51: mol_type = other DNA

SEQ ID NO: 2984 - DNA, 57 bp, synthetic construct
  misc_feature 1..57: note = source = /note="Description of Artificial Sequence: Synthetic oligonucleotide"
  source 1..57: mol_type = other DNA
gggggggattacgtttgggggacttatcggcctcactactactacggtatggacgtc

SEQ ID NO: 2985 - DNA, 36 bp, synthetic construct
  misc_feature 1..36: note = source = /note="Description of Artificial Sequence: Synthetic oligonucleotide"
  source 1..36: mol_type = other DNA
gatgggacgatctttggagtggtcttgggggactac

SEQ ID NO: 2986 - DNA, 36 bp, synthetic construct
  misc_feature 1..36: note = source = /note="Description of Artificial Sequence: Synthetic oligonucleotide"
  source 1..36: mol_type = other DNA
gatgggacgatttttggagtgctcttgggggactac

SEQ ID NO: 2987 - DNA, 33 bp, synthetic construct
  misc_feature 1..33: note = source = /note="Description of Artificial Sequence: Synthetic oligonucleotide"
  source 1..33: mol_type = other DNA
gataggacgatttttggagtggttcttgactac

SEQ ID NO: 2988 - DNA, 42 bp, synthetic construct
  misc_feature 1..42: note = source = /note="Description of Artificial Sequence: Synthetic oligonucleotide"
  source 1..42: mol_type = other DNA
gaggccacgatttttggaatggttattgtaccgtttgactac

SEQ ID NO: 2989 - DNA, 42 bp, synthetic construct; identical to SEQ ID NO: 2988
  misc_feature 1..42: note = source = /note="Description of Artificial Sequence: Synthetic oligonucleotide"
  source 1..42: mol_type = other DNA

SEQ ID NO: 2990 - DNA, 42 bp, synthetic construct
  misc_feature 1..42: note = source = /note="Description of Artificial Sequence: Synthetic oligonucleotide"
  source 1..42: mol_type = other DNA
gaggccacgatttttggaatgcttattgtaccatttgactac

SEQ ID NO: 2991 - DNA, 42 bp, synthetic construct; identical to SEQ ID NO: 2990
  misc_feature 1..42: note = source = /note="Description of Artificial Sequence: Synthetic oligonucleotide"
  source 1..42: mol_type = other DNA

SEQ ID NO: 2992 - DNA, 48 bp, synthetic construct
  misc_feature 1..48: note = source = /note="Description of Artificial Sequence: Synthetic oligonucleotide"
  source 1..48: mol_type = other DNA
gatcgtattacgatttttggagtggttatggggggcggtatggacgtc

SEQ ID NO: 2993 - DNA, 33 bp, synthetic construct
  misc_feature 1..33: note = source = /note="Description of Artificial Sequence: Synthetic oligonucleotide"
  source 1..33: mol_type = other DNA
gatcaggcgatttttggagtggtccccgactac

SEQ ID NO: 2994 - DNA, 36 bp, synthetic construct; identical to SEQ ID NO: 2986
  misc_feature 1..36: note = source = /note="Description of Artificial Sequence: Synthetic oligonucleotide"
  source 1..36: mol_type = other DNA

SEQ ID NO: 2995 - DNA, 33 bp, synthetic construct
  misc_feature 1..33: note = source = /note="Description of Artificial Sequence: Synthetic oligonucleotide"
  source 1..33: mol_type = other DNA
gatcggacgatttttggagtggtccttgagtac

SEQ ID NO: 2996 - DNA, 27 bp, synthetic construct
  misc_feature 1..27: note = source = /note="Description of Artificial Sequence: Synthetic oligonucleotide"
  source 1..27: mol_type = other DNA
gatgtagcagtggctggctttgactac

SEQ ID NO: 2997 - DNA, 27 bp, synthetic construct
  misc_feature 1..27: note = source = /note="Description of Artificial Sequence: Synthetic oligonucleotide"
  source 1..27: mol_type = other DNA
gatgtagcagtggctggctttgactac

SEQ ID NO: 2998 - DNA, 36 bp, synthetic construct; identical to SEQ ID NO: 2986
  misc_feature 1..36: note = source = /note="Description of Artificial Sequence: Synthetic oligonucleotide"
  source 1..36: mol_type = other DNA

SEQ ID NO: 2999 - DNA, 36 bp, synthetic construct; identical to SEQ ID NO: 2986
  misc_feature 1..36: note = source = /note="Description of Artificial Sequence: Synthetic oligonucleotide"
  source 1..36: mol_type = other DNA

SEQ ID NO: 3000 - DNA, 36 bp, synthetic construct; identical to SEQ ID NO: 2986
  misc_feature 1..36: note = source = /note="Description of Artificial Sequence: Synthetic oligonucleotide"
  source 1..36: mol_type = other DNA

SEQ ID NO: 3001 - DNA, 36 bp, synthetic construct; identical to SEQ ID NO: 2986
  misc_feature 1..36: note = source = /note="Description of Artificial Sequence: Synthetic oligonucleotide"
  source 1..36: mol_type = other DNA

SEQ ID NO: 3002 - DNA, 36 bp, synthetic construct; identical to SEQ ID NO: 2986
  misc_feature 1..36: note = source = /note="Description of Artificial Sequence: Synthetic oligonucleotide"
  source 1..36: mol_type = other DNA

SEQ ID NO: 3003 - DNA, 36 bp, synthetic construct
  misc_feature 1..36: note = source = /note="Description of Artificial Sequence: Synthetic oligonucleotide"
  source 1..36: mol_type = other DNA
gataggacgatttttggagtgctcttgggggactac

SEQ ID NO: 3004 - DNA, 36 bp, synthetic construct; identical to SEQ ID NO: 2985
  misc_feature 1..36: note = source = /note="Description of Artificial Sequence: Synthetic oligonucleotide"
  source 1..36: mol_type = other DNA

SEQ ID NO: 3005 - DNA, 36 bp, synthetic construct; identical to SEQ ID NO: 2985
  misc_feature 1..36: note = source = /note="Description of Artificial Sequence: Synthetic oligonucleotide"
  source 1..36: mol_type = other DNA

SEQ ID NO: 3006 - DNA, 36 bp, synthetic construct; identical to SEQ ID NO: 2985
  misc_feature 1..36: note = source = /note="Description of Artificial Sequence: Synthetic oligonucleotide"
  source 1..36: mol_type = other DNA

SEQ ID NO: 3007 - DNA, 36 bp, synthetic construct; identical to SEQ ID NO: 2985
  misc_feature 1..36: note = source = /note="Description of Artificial Sequence: Synthetic oligonucleotide"
  source 1..36: mol_type = other DNA

SEQ ID NO: 3008 - DNA, 36 bp, synthetic construct; identical to SEQ ID NO: 2985
  misc_feature 1..36: note = source = /note="Description of Artificial Sequence: Synthetic oligonucleotide"
  source 1..36: mol_type = other DNA

SEQ ID NO: 3009 - DNA, 36 bp, synthetic construct
  misc_feature 1..36: note = source = /note="Description of Artificial Sequence: Synthetic oligonucleotide"
  source 1..36: mol_type = other DNA
gataggacgatctttggagtggtcttgggggactac

SEQ ID NO: 3010 - DNA, 36 bp, synthetic construct; identical to SEQ ID NO: 2985
  misc_feature 1..36: note = source = /note="Description of Artificial Sequence: Synthetic oligonucleotide"
  source 1..36: mol_type = other DNA

SEQ ID NO: 3011 - DNA, 36 bp, synthetic construct; identical to SEQ ID NO: 2985
  misc_feature 1..36: note = source = /note="Description of Artificial Sequence: Synthetic oligonucleotide"
  source 1..36: mol_type = other DNA

SEQ ID NO: 3012 - DNA, 36 bp, synthetic construct; identical to SEQ ID NO: 2985
  misc_feature 1..36: note = source = /note="Description of Artificial Sequence: Synthetic oligonucleotide"
  source 1..36: mol_type = other DNA

SEQ ID NO: 3013 - DNA, 36 bp, synthetic construct; identical to SEQ ID NO: 2985
  misc_feature 1..36: note = source = /note="Description of Artificial Sequence: Synthetic oligonucleotide"
  source 1..36: mol_type = other DNA

SEQ ID NO: 3014 - DNA, 36 bp, synthetic construct; identical to SEQ ID NO: 2985
  misc_feature 1..36: note = source = /note="Description of Artificial Sequence: Synthetic oligonucleotide"
  source 1..36: mol_type = other DNA

SEQ ID NO: 3015 - DNA, 36 bp, synthetic construct; identical to SEQ ID NO: 2985
  misc_feature 1..36: note = source = /note="Description of Artificial Sequence: Synthetic oligonucleotide"
  source 1..36: mol_type = other DNA

SEQ ID NO: 3016 - DNA, 36 bp, synthetic construct; identical to SEQ ID NO: 2985
  misc_feature 1..36: note = source = /note="Description of Artificial Sequence: Synthetic oligonucleotide"
  source 1..36: mol_type = other DNA

SEQ ID NO: 3017 - DNA, 36 bp, synthetic construct; identical to SEQ ID NO: 2985
  misc_feature 1..36: note = source = /note="Description of Artificial Sequence: Synthetic oligonucleotide"
  source 1..36: mol_type = other DNA

SEQ ID NO: 3018 - DNA, 36 bp, synthetic construct; identical to SEQ ID NO: 2985
  misc_feature 1..36: note = source = /note="Description of Artificial Sequence: Synthetic oligonucleotide"
  source 1..36: mol_type = other DNA

SEQ ID NO: 3019 - DNA, 36 bp, synthetic construct; identical to SEQ ID NO: 2985
  misc_feature 1..36: note = source = /note="Description of Artificial Sequence: Synthetic oligonucleotide"
  source 1..36: mol_type = other DNA

SEQ ID NO: 3020 - DNA, 36 bp, synthetic construct; identical to SEQ ID NO: 2985
  misc_feature 1..36: note = source = /note="Description of Artificial Sequence: Synthetic oligonucleotide"
  source 1..36: mol_type = other DNA

SEQ ID NO: 3021 - DNA, 36 bp, synthetic construct; identical to SEQ ID NO: 3009
  misc_feature 1..36: note = source = /note="Description of Artificial Sequence: Synthetic oligonucleotide"
  source 1..36: mol_type = other DNA

SEQ ID NO: 3022 - DNA, 36 bp, synthetic construct; identical to SEQ ID NO: 2985
  misc_feature 1..36: note = source = /note="Description of Artificial Sequence: Synthetic oligonucleotide"
  source 1..36: mol_type = other DNA

SEQ ID NO: 3023 - DNA, 33 bp, synthetic construct; identical to SEQ ID NO: 2987
  misc_feature 1..33: note = source = /note="Description of Artificial Sequence: Synthetic oligonucleotide"
  source 1..33: mol_type = other DNA

SEQ ID NO: 3024 - DNA, 33 bp, synthetic construct; identical to SEQ ID NO: 2987
  misc_feature 1..33: note = source = /note="Description of Artificial Sequence: Synthetic oligonucleotide"
  source 1..33: mol_type = other DNA

SEQ ID NO: 3025 - DNA, 33 bp, synthetic construct; identical to SEQ ID NO: 2987
  misc_feature 1..33: note = source = /note="Description of Artificial Sequence: Synthetic oligonucleotide"
  source 1..33: mol_type = other DNA

SEQ ID NO: 3026 - DNA, 33 bp, synthetic construct; identical to SEQ ID NO: 2987
  misc_feature 1..33: note = source = /note="Description of Artificial Sequence: Synthetic oligonucleotide"
  source 1..33: mol_type = other DNA

SEQ ID NO: 3027 - DNA, 33 bp, synthetic construct; identical to SEQ ID NO: 2987
  misc_feature 1..33: note = source = /note="Description of Artificial Sequence: Synthetic oligonucleotide"
  source 1..33: mol_type = other DNA

SEQ ID NO: 3028 - DNA, 33 bp, synthetic construct; identical to SEQ ID NO: 2987
  misc_feature 1..33: note = source = /note="Description of Artificial Sequence: Synthetic oligonucleotide"
  source 1..33: mol_type = other DNA

SEQ ID NO: 3029 - DNA, 33 bp, synthetic construct; identical to SEQ ID NO: 2987
  misc_feature 1..33: note = source = /note="Description of Artificial Sequence: Synthetic oligonucleotide"
  source 1..33: mol_type = other DNA

SEQ ID NO: 3030 - DNA, 33 bp, synthetic construct; identical to SEQ ID NO: 2987
  misc_feature 1..33: note = source = /note="Description of Artificial Sequence: Synthetic oligonucleotide"
  source 1..33: mol_type = other DNA

SEQ ID NO: 3031 - DNA, 33 bp, synthetic construct; identical to SEQ ID NO: 2987
  misc_feature 1..33: note = source = /note="Description of Artificial Sequence: Synthetic oligonucleotide"
  source 1..33: mol_type = other DNA

SEQ ID NO: 3032 - DNA, 36 bp, synthetic construct; identical to SEQ ID NO: 2986
  misc_feature 1..36: note = source = /note="Description of Artificial Sequence: Synthetic oligonucleotide"
  source 1..36: mol_type = other DNA

SEQ ID NO: 3033 - DNA, 36 bp, synthetic construct; identical to SEQ ID NO: 3003
  misc_feature 1..36: note = source = /note="Description of Artificial Sequence: Synthetic oligonucleotide"
  source 1..36: mol_type = other DNA

SEQ ID NO: 3034 - DNA, 36 bp, synthetic construct; identical to SEQ ID NO: 2986
  misc_feature 1..36: note = source = /note="Description of Artificial Sequence: Synthetic oligonucleotide"
  source 1..36: mol_type = other DNA

SEQ ID NO: 3035 - DNA, 36 bp, synthetic construct; identical to SEQ ID NO: 3003
  misc_feature 1..36: note = source = /note="Description of Artificial Sequence: Synthetic oligonucleotide"
  source 1..36: mol_type = other DNA

SEQ ID NO: 3036 - DNA, 36 bp, synthetic construct; identical to SEQ ID NO: 2986
  misc_feature 1..36: note = source = /note="Description of Artificial Sequence: Synthetic oligonucleotide"
  source 1..36: mol_type = other DNA

SEQ ID NO: 3037 - DNA, 36 bp, synthetic construct; identical to SEQ ID NO: 2986
  misc_feature 1..36: note = source = /note="Description of Artificial Sequence: Synthetic oligonucleotide"
  source 1..36: mol_type = other DNA

SEQ ID NO: 3038 - DNA, 36 bp, synthetic construct; identical to SEQ ID NO: 2986
  misc_feature 1..36: note = source = /note="Description of Artificial Sequence: Synthetic oligonucleotide"
  source 1..36: mol_type = other DNA

SEQ ID NO: 3039 - DNA, 33 bp, synthetic construct; identical to SEQ ID NO: 2995
  misc_feature 1..33: note = source = /note="Description of Artificial Sequence: Synthetic oligonucleotide"
  source 1..33: mol_type = other DNA

SEQ ID NO: 3040 - DNA, 33 bp, synthetic construct; identical to SEQ ID NO: 2995
  misc_feature 1..33: note = source = /note="Description of Artificial Sequence: Synthetic oligonucleotide"
  source 1..33: mol_type = other DNA

SEQ ID NO: 3041 - DNA, 33 bp, synthetic construct; identical to SEQ ID NO: 2995
  misc_feature 1..33: note = source = /note="Description of Artificial Sequence: Synthetic oligonucleotide"
  source 1..33: mol_type = other DNA

SEQ ID NO: 3042 - DNA, 33 bp, synthetic construct; identical to SEQ ID NO: 2995
  misc_feature 1..33: note = source = /note="Description of Artificial Sequence: Synthetic oligonucleotide"
  source 1..33: mol_type = other DNA

SEQ ID NO: 3043 - DNA, 33 bp, synthetic construct; identical to SEQ ID NO: 2995
  misc_feature 1..33: note = source = /note="Description of Artificial Sequence: Synthetic oligonucleotide"
  source 1..33: mol_type = other DNA

SEQ ID NO: 3044 - DNA, 33 bp, synthetic construct; identical to SEQ ID NO: 2995
  misc_feature 1..33: note = source = /note="Description of Artificial Sequence: Synthetic oligonucleotide"
  source 1..33: mol_type = other DNA

SEQ ID NO: 3045 - DNA, 33 bp, synthetic construct; identical to SEQ ID NO: 2995
  misc_feature 1..33: note = source = /note="Description of Artificial Sequence: Synthetic oligonucleotide"
  source 1..33: mol_type = other DNA

SEQ ID NO: 3046 - DNA, 33 bp, synthetic construct; identical to SEQ ID NO: 2995
  misc_feature 1..33: note = source = /note="Description of Artificial Sequence: Synthetic oligonucleotide"
  source 1..33: mol_type = other DNA

SEQ ID NO: 3047 - DNA, 33 bp, synthetic construct; identical to SEQ ID NO: 2995
  misc_feature 1..33: note = source = /note="Description of Artificial Sequence: Synthetic oligonucleotide"
  source 1..33: mol_type = other DNA

SEQ ID NO: 3048 - DNA, 33 bp, synthetic construct; identical to SEQ ID NO: 2995
  misc_feature 1..33: note = source = /note="Description of Artificial Sequence: Synthetic oligonucleotide"
  source 1..33: mol_type = other DNA

SEQ ID NO: 3049 - DNA, 33 bp, synthetic construct; identical to SEQ ID NO: 2995
  misc_feature 1..33: note = source = /note="Description of Artificial Sequence: Synthetic oligonucleotide"
  source 1..33: mol_type = other DNA

SEQ ID NO: 3050 - DNA, 33 bp, synthetic construct
  misc_feature 1..33: note = source = /note="Description of Artificial Sequence: Synthetic oligonucleotide"
  source 1..33: mol_type = other DNA
gggattacgatttttggtcatgggtttgaatat

SEQ ID NO: 3051 - DNA, 33 bp, synthetic construct; identical to SEQ ID NO: 3050
  misc_feature 1..33: note = source = /note="Description of Artificial Sequence: Synthetic oligonucleotide"
  source 1..33: mol_type = other DNA

SEQ ID NO: 3052 - DNA, 33 bp, synthetic construct; identical to SEQ ID NO: 3050
  misc_feature 1..33: note = source = /note="Description of Artificial Sequence: Synthetic oligonucleotide"
  source 1..33: mol_type = other DNA

SEQ ID NO: 3053 - DNA, 33 bp, synthetic construct; identical to SEQ ID NO: 3050
  misc_feature 1..33: note = source = /note="Description of Artificial Sequence: Synthetic oligonucleotide"
  source 1..33: mol_type = other DNA

SEQ ID NO: 3054 - DNA, 33 bp, synthetic construct; identical to SEQ ID NO: 2993
  misc_feature 1..33: note = source = /note="Description of Artificial Sequence: Synthetic oligonucleotide"
  source 1..33: mol_type = other DNA

SEQ ID NO: 3055 - DNA, 33 bp, synthetic construct; identical to SEQ ID NO: 2993
  misc_feature 1..33: note = source = /note="Description of Artificial Sequence: Synthetic oligonucleotide"
  source 1..33: mol_type = other DNA

SEQ ID NO: 3056 - DNA, 33 bp, synthetic construct; identical to SEQ ID NO: 2993
  misc_feature 1..33: note = source = /note="Description of Artificial Sequence: Synthetic oligonucleotide"
  source 1..33: mol_type = other DNA

SEQ ID NO: 3057 - DNA, 33 bp, synthetic construct; identical to SEQ ID NO: 2993
  misc_feature 1..33: note = source = /note="Description of Artificial Sequence: Synthetic oligonucleotide"
  source 1..33: mol_type = other DNA

SEQ ID NO: 3058 - DNA, 33 bp, synthetic construct; identical to SEQ ID NO: 2993
  misc_feature 1..33: note = source = /note="Description of Artificial Sequence: Synthetic oligonucleotide"
  source 1..33: mol_type = other DNA

SEQ ID NO: 3059 - DNA, 33 bp, synthetic construct; identical to SEQ ID NO: 2993
  misc_feature 1..33: note = source = /note="Description of Artificial Sequence: Synthetic oligonucleotide"
  source 1..33: mol_type = other DNA

SEQ ID NO: 3060 - DNA, 33 bp, synthetic construct; identical to SEQ ID NO: 2993
  misc_feature 1..33: note = source = /note="Description of Artificial Sequence: Synthetic oligonucleotide"
  source 1..33: mol_type = other DNA

SEQ ID NO: 3061 - DNA, 33 bp, synthetic construct; identical to SEQ ID NO: 2993
  misc_feature 1..33: note = source = /note="Description of Artificial Sequence: Synthetic oligonucleotide"
  source 1..33: mol_type = other DNA

SEQ ID NO: 3062 - DNA, 48 bp, synthetic construct; identical to SEQ ID NO: 2992
  misc_feature 1..48: note = source = /note="Description of Artificial Sequence: Synthetic oligonucleotide"
  source 1..48: mol_type = other DNA

SEQ ID NO: 3063 - DNA, 48 bp, synthetic construct; identical to SEQ ID NO: 2992
  misc_feature 1..48: note = source = /note="Description of Artificial Sequence: Synthetic oligonucleotide"
  source 1..48: mol_type = other DNA

SEQ ID NO: 3064 - DNA, 48 bp, synthetic construct; identical to SEQ ID NO: 2992
  misc_feature 1..48: note = source = /note="Description of Artificial Sequence: Synthetic oligonucleotide"
  source 1..48: mol_type = other DNA

SEQ ID NO: 3065 - DNA, 48 bp, synthetic construct; identical to SEQ ID NO: 2992
  misc_feature 1..48: note = source = /note="Description of Artificial Sequence: Synthetic oligonucleotide"
  source 1..48: mol_type = other DNA

SEQ ID NO: 3066 - DNA, 48 bp, synthetic construct; identical to SEQ ID NO: 2992
  misc_feature 1..48: note = source = /note="Description of Artificial Sequence: Synthetic oligonucleotide"
  source 1..48: mol_type = other DNA

SEQ ID NO: 3067 - DNA, 48 bp, synthetic construct; identical to SEQ ID NO: 2992
  misc_feature 1..48: note = source = /note="Description of Artificial Sequence: Synthetic oligonucleotide"
  source 1..48: mol_type = other DNA

SEQ ID NO: 3068 - DNA, 48 bp, synthetic construct; identical to SEQ ID NO: 2992
  misc_feature 1..48: note = source = /note="Description of Artificial Sequence: Synthetic oligonucleotide"
  source 1..48: mol_type = other DNA

SEQ ID NO: 3069 - DNA, 42 bp, synthetic construct; identical to SEQ ID NO: 2988
  misc_feature 1..42: note = source = /note="Description of Artificial Sequence: Synthetic oligonucleotide"
  source 1..42: mol_type = other DNA

SEQ ID NO: 3070 - DNA, 42 bp, synthetic construct; identical to SEQ ID NO: 2988
  misc_feature 1..42: note = source = /note="Description of Artificial Sequence: Synthetic oligonucleotide"
  source 1..42: mol_type = other DNA

SEQ ID NO: 3071 - DNA, 42 bp, synthetic construct; identical to SEQ ID NO: 2988
  misc_feature 1..42: note = source = /note="Description of Artificial Sequence: Synthetic oligonucleotide"
  source 1..42: mol_type = other DNA

SEQ ID NO: 3072 - DNA, 42 bp, synthetic construct; identical to SEQ ID NO: 2988
  misc_feature 1..42: note = source = /note="Description of Artificial Sequence: Synthetic oligonucleotide"
  source 1..42: mol_type = other DNA

SEQ ID NO: 3073 - DNA, 42 bp, synthetic construct; identical to SEQ ID NO: 2988
  misc_feature 1..42: note = source = /note="Description of Artificial Sequence: Synthetic oligonucleotide"
  source 1..42: mol_type = other DNA

SEQ ID NO: 3074 - DNA, 42 bp, synthetic construct; identical to SEQ ID NO: 2988
  misc_feature 1..42: note = source = /note="Description of Artificial Sequence: Synthetic oligonucleotide"
  source 1..42: mol_type = other DNA

SEQ ID NO: 3075 - DNA, 42 bp, synthetic construct; identical to SEQ ID NO: 2988
  misc_feature 1..42: note = source = /note="Description of Artificial Sequence: Synthetic oligonucleotide"
  source 1..42: mol_type = other DNA

SEQ ID NO: 3076 - DNA, 42 bp, synthetic construct; identical to SEQ ID NO: 2988
  misc_feature 1..42: note = source = /note="Description of Artificial Sequence: Synthetic oligonucleotide"
  source 1..42: mol_type = other DNA

SEQ ID NO: 3077 - DNA, 42 bp, synthetic construct; identical to SEQ ID NO: 2988
  misc_feature 1..42: note = source = /note="Description of Artificial Sequence: Synthetic oligonucleotide"
  source 1..42: mol_type = other DNA

SEQ ID NO: 3078 - DNA, 42 bp, synthetic construct; identical to SEQ ID NO: 2988
  misc_feature 1..42: note = source = /note="Description of Artificial Sequence: Synthetic oligonucleotide"
  source 1..42: mol_type = other DNA

SEQ ID NO: 3079 - DNA, 42 bp, synthetic construct; identical to SEQ ID NO: 2988
  misc_feature 1..42: note = source = /note="Description of Artificial Sequence: Synthetic oligonucleotide"
  source 1..42: mol_type = other DNA

SEQ ID NO: 3080 - DNA, 42 bp, synthetic construct; identical to SEQ ID NO: 2990
  misc_feature 1..42: note = source = /note="Description of Artificial Sequence: Synthetic oligonucleotide"
  source 1..42: mol_type = other DNA

SEQ ID NO: 3081 - DNA, 42 bp, synthetic construct; identical to SEQ ID NO: 2990
  misc_feature 1..42: note = source = /note="Description of Artificial Sequence: Synthetic oligonucleotide"
  source 1..42: mol_type = other DNA

SEQ ID NO: 3082 - DNA, 42 bp, synthetic construct; identical to SEQ ID NO: 2990
  misc_feature 1..42: note = source = /note="Description of Artificial Sequence: Synthetic oligonucleotide"
  source 1..42: mol_type = other DNA

SEQ ID NO: 3083 - DNA, 42 bp, synthetic construct; identical to SEQ ID NO: 2990
  misc_feature 1..42: note = source = /note="Description of Artificial Sequence: Synthetic oligonucleotide"
  source 1..42: mol_type = other DNA

SEQ ID NO: 3084 - DNA, 42 bp, synthetic construct; identical to SEQ ID NO: 2990
  misc_feature 1..42: note = source = /note="Description of Artificial Sequence: Synthetic oligonucleotide"
  source 1..42: mol_type = other DNA

SEQ ID NO: 3085 - DNA, 42 bp, synthetic construct; identical to SEQ ID NO: 2990
  misc_feature 1..42: note = source = /note="Description of Artificial Sequence: Synthetic oligonucleotide"
  source 1..42: mol_type = other DNA

SEQ ID NO: 3086 - DNA, 42 bp, synthetic construct; identical to SEQ ID NO: 2990
  misc_feature 1..42: note = source = /note="Description of Artificial Sequence: Synthetic oligonucleotide"
  source 1..42: mol_type = other DNA

SEQ ID NO: 3087 - DNA, 42 bp, synthetic construct; identical to SEQ ID NO: 2990
  misc_feature 1..42: note = source = /note="Description of Artificial Sequence: Synthetic oligonucleotide"
  source 1..42: mol_type = other DNA

SEQ ID NO: 3088 - DNA, 42 bp, synthetic construct; identical to SEQ ID NO: 2990
  misc_feature 1..42: note = source = /note="Description of Artificial Sequence: Synthetic oligonucleotide"
  source 1..42: mol_type = other DNA

SEQ ID NO: 3089 - DNA, 42 bp, synthetic construct; identical to SEQ ID NO: 2988
  misc_feature 1..42: note = source = /note="Description of Artificial Sequence: Synthetic oligonucleotide"
  source 1..42: mol_type = other DNA

SEQ ID NO: 3090 - DNA, 42 bp, synthetic construct; identical to SEQ ID NO: 2988
  misc_feature 1..42: note = source = /note="Description of Artificial Sequence: Synthetic oligonucleotide"
  source 1..42: mol_type = other DNA

SEQ ID NO: 3091 - DNA, 42 bp, synthetic construct; identical to SEQ ID NO: 2988
  misc_feature 1..42: note = source = /note="Description of Artificial Sequence: Synthetic oligonucleotide"
  source 1..42: mol_type = other DNA

SEQ ID NO: 3092 - DNA, 42 bp, synthetic construct; identical to SEQ ID NO: 2988
  misc_feature 1..42: note = source = /note="Description of Artificial Sequence: Synthetic oligonucleotide"
  source 1..42: mol_type = other DNA

SEQ ID NO: 3093 - DNA, 42 bp, synthetic construct; identical to SEQ ID NO: 2988
  misc_feature 1..42: note = source = /note="Description of Artificial Sequence: Synthetic oligonucleotide"
  source 1..42: mol_type = other DNA

SEQ ID NO: 3094 - DNA, 42 bp, synthetic construct; identical to SEQ ID NO: 2990
  misc_feature 1..42: note = source = /note="Description of Artificial Sequence: Synthetic oligonucleotide"
  source 1..42: mol_type = other DNA

SEQ ID NO: 3095 - DNA, 42 bp, synthetic construct; identical to SEQ ID NO: 2990
  misc_feature 1..42: note = source = /note="Description of Artificial Sequence: Synthetic oligonucleotide"
  source 1..42: mol_type = other DNA

SEQ ID NO: 3096 - DNA, 42 bp, synthetic construct; identical to SEQ ID NO: 2990
  misc_feature 1..42: note = source = /note="Description of Artificial Sequence: Synthetic oligonucleotide"
  source 1..42: mol_type = other DNA

SEQ ID NO: 3097 - DNA, 42 bp, synthetic construct; identical to SEQ ID NO: 2990
  misc_feature 1..42: note = source = /note="Description of Artificial Sequence: Synthetic oligonucleotide"
  source 1..42: mol_type = other DNA

SEQ ID NO: 3098 - DNA, 42 bp, synthetic construct; identical to SEQ ID NO: 2990
  misc_feature 1..42: note = source = /note="Description of Artificial Sequence: Synthetic oligonucleotide"
  source 1..42: mol_type = other DNA

SEQ ID NO: 3099 - DNA, 42 bp, synthetic construct; identical to SEQ ID NO: 2990
  misc_feature 1..42: note = source = /note="Description of Artificial Sequence: Synthetic oligonucleotide"
  source 1..42: mol_type = other DNA

SEQ ID NO: 3100 - DNA, 42 bp, synthetic construct; identical to SEQ ID NO: 2990
  misc_feature 1..42: note = source = /note="Description of Artificial Sequence: Synthetic oligonucleotide"
  source 1..42: mol_type = other DNA

SEQ ID NO: 3101 - DNA, 42 bp, synthetic construct; identical to SEQ ID NO: 2990
  misc_feature 1..42: note = source = /note="Description of Artificial Sequence: Synthetic oligonucleotide"
  source 1..42: mol_type = other DNA

SEQ ID NO: 3102 - DNA, 42 bp, synthetic construct; identical to SEQ ID NO: 2990
  misc_feature 1..42: note = source = /note="Description of Artificial Sequence: Synthetic oligonucleotide"
  source 1..42: mol_type = other DNA

SEQ ID NO: 3103 - DNA, 42 bp, synthetic construct; identical to SEQ ID NO: 2990
  misc_feature 1..42: note = source = /note="Description of Artificial Sequence: Synthetic oligonucleotide"
  source 1..42: mol_type = other DNA

SEQ ID NO: 3104 - DNA, 42 bp, synthetic construct; identical to SEQ ID NO: 2990
  misc_feature 1..42: note = source = /note="Description of Artificial Sequence: Synthetic oligonucleotide"
  source 1..42: mol_type = other DNA

SEQ ID NO: 3105 - DNA, 42 bp, synthetic construct; identical to SEQ ID NO: 2990
  misc_feature 1..42: note = source = /note="Description of Artificial Sequence: Synthetic oligonucleotide"
  source 1..42: mol_type = other DNA

SEQ ID NO: 3106 - DNA, 42 bp, synthetic construct; identical to SEQ ID NO: 2990
  misc_feature 1..42: note = source = /note="Description of Artificial Sequence: Synthetic oligonucleotide"
  source 1..42: mol_type = other DNA

SEQ ID NO: 3107 - DNA, 57 bp, synthetic construct; identical to SEQ ID NO: 2984
  misc_feature 1..57: note = source = /note="Description of Artificial Sequence: Synthetic oligonucleotide"
  source 1..57: mol_type = other DNA

SEQ ID NO: 3108 - DNA, 57 bp, synthetic construct; identical to SEQ ID NO: 2984
  misc_feature 1..57: note = source = /note="Description of Artificial Sequence: Synthetic oligonucleotide"
  source 1..57: mol_type = other DNA

SEQ ID NO: 3109 - DNA, 57 bp, synthetic construct; identical to SEQ ID NO: 2984
  misc_feature 1..57: note = source = /note="Description of Artificial Sequence: Synthetic oligonucleotide"
  source 1..57: mol_type = other DNA

SEQ ID NO: 3110 - DNA, 57 bp, synthetic construct; identical to SEQ ID NO: 2984
  misc_feature 1..57: note = source = /note="Description of Artificial Sequence: Synthetic oligonucleotide"
  source 1..57: mol_type = other DNA

SEQ ID NO: 3111 - DNA, 57 bp, synthetic construct; identical to SEQ ID NO: 2984
  misc_feature 1..57: note = source = /note="Description of Artificial Sequence: Synthetic oligonucleotide"
  source 1..57: mol_type = other DNA

SEQ ID NO: 3112 - DNA, 57 bp, synthetic construct; identical to SEQ ID NO: 2984
  misc_feature 1..57: note = source = /note="Description of Artificial Sequence: Synthetic oligonucleotide"
  source 1..57: mol_type = other DNA

SEQ ID NO: 3113 - DNA, 57 bp, synthetic construct; identical to SEQ ID NO: 2984
  misc_feature 1..57: note = source = /note="Description of Artificial Sequence: Synthetic oligonucleotide"
  source 1..57: mol_type = other DNA

SEQ ID NO: 3114 - DNA, 57 bp, synthetic construct; identical to SEQ ID NO: 2984
  misc_feature 1..57: note = source = /note="Description of Artificial Sequence: Synthetic oligonucleotide"
  source 1..57: mol_type = other DNA

SEQ ID NO: 3115 - DNA, 57 bp, synthetic construct; identical to SEQ ID NO: 2984
  misc_feature 1..57: note = source = /note="Description of Artificial Sequence: Synthetic oligonucleotide"
  source 1..57: mol_type = other DNA

SEQ ID NO: 3116 - DNA, 57 bp, synthetic construct; identical to SEQ ID NO: 2984
  misc_feature 1..57: note = source = /note="Description of Artificial Sequence: Synthetic oligonucleotide"
  source 1..57: mol_type = other DNA

SEQ ID NO: 3117 - DNA, 57 bp, synthetic construct; identical to SEQ ID NO: 2984
  misc_feature 1..57: note = source = /note="Description of Artificial Sequence: Synthetic oligonucleotide"
  source 1..57: mol_type = other DNA

SEQ ID NO: 3118 - DNA, 57 bp, synthetic construct; identical to SEQ ID NO: 2984
  misc_feature 1..57: note = source = /note="Description of Artificial Sequence: Synthetic oligonucleotide"
  source 1..57: mol_type = other DNA

SEQ ID NO: 3119 - DNA, 57 bp, synthetic construct
  misc_feature 1..57: note = source = /note="Description of Artificial Sequence: Synthetic oligonucleotide"
  source 1..57: mol_type = other DNA
gggggggattacgttttcgggacttatcggcctcactactactacggtatggacgtc

SEQ ID NO: 3120 - DNA, 57 bp, synthetic construct; identical to SEQ ID NO: 3119
  misc_feature 1..57: note = source = /note="Description of Artificial Sequence: Synthetic oligonucleotide"
  source 1..57: mol_type = other DNA

SEQ ID NO: 3121 - DNA, 36 bp, synthetic construct; identical to SEQ ID NO: 3009
  misc_feature 1..36: note = source = /note="Description of Artificial Sequence: Synthetic oligonucleotide"
  source 1..36: mol_type = other DNA

SEQ ID NO: 3122 - DNA, 36 bp, synthetic construct; identical to SEQ ID NO: 3003
  misc_feature 1..36: note = source = /note="Description of Artificial Sequence: Synthetic oligonucleotide"
  source 1..36: mol_type = other DNA

SEQ ID NO: 3123 - DNA, 57 bp, synthetic construct; identical to SEQ ID NO: 2984
  misc_feature 1..57: note = source = /note="Description of Artificial Sequence: Synthetic oligonucleotide"
  source 1..57: mol_type = other DNA

SEQ ID NO: 3124 - DNA, 36 bp, synthetic construct
  misc_feature 1..36: note = source = /note="Description of Artificial Sequence: Synthetic oligonucleotide"
  source 1..36: mol_type = other DNA
ggaaaagtggctggtatgcctgaagcttttgaaatc

SEQ ID NO: 3125 - DNA, 60 bp, synthetic construct
  misc_feature 1..60: note = source = /note="Description of Artificial Sequence: Synthetic oligonucleotide"
  source 1..60: mol_type = other DNA
gggggtgattacgtttgggggagttatcgtccctactactactactacggtatggacgtc

SEQ ID NO: 3126 - DNA, 36 bp, synthetic construct; identical to SEQ ID NO: 3124
  misc_feature 1..36: note = source = /note="Description of Artificial Sequence: Synthetic oligonucleotide"
  source 1..36: mol_type = other DNA

SEQ ID NO: 3127 - DNA, 36 bp, synthetic construct; identical to SEQ ID NO: 3124
  misc_feature 1..36: note = source = /note="Description of Artificial Sequence: Synthetic oligonucleotide"
  source 1..36: mol_type = other DNA

SEQ ID NO: 3128 - DNA, 36 bp, synthetic construct; identical to SEQ ID NO: 3124
  misc_feature 1..36: note = source = /note="Description of Artificial Sequence: Synthetic oligonucleotide"
  source 1..36: mol_type = other DNA

SEQ ID NO: 3129 - DNA, 36 bp, synthetic construct; identical to SEQ ID NO: 3124
  misc_feature 1..36: note = source = /note="Description of Artificial Sequence: Synthetic oligonucleotide"
  source 1..36: mol_type = other DNA

SEQ ID NO: 3130 - DNA, 36 bp, synthetic construct; identical to SEQ ID NO: 3124
  misc_feature 1..36: note = source = /note="Description of Artificial Sequence: Synthetic oligonucleotide"
  source 1..36: mol_type = other DNA

SEQ ID NO: 3131 - DNA, 36 bp, synthetic construct; identical to SEQ ID NO: 3124
  misc_feature 1..36: note = source = /note="Description of Artificial Sequence: Synthetic oligonucleotide"
  source 1..36: mol_type = other DNA

SEQ ID NO: 3132 - DNA, 60 bp, synthetic construct; identical to SEQ ID NO: 3125
  misc_feature 1..60: note = source = /note="Description of Artificial Sequence: Synthetic oligonucleotide"
  source 1..60: mol_type = other DNA

SEQ ID NO: 3133 - DNA, 60 bp, synthetic construct; identical to SEQ ID NO: 3125
  misc_feature 1..60: note = source = /note="Description of Artificial Sequence: Synthetic oligonucleotide"
  source 1..60: mol_type = other DNA

SEQ ID NO: 3134 - DNA, 60 bp, synthetic construct; identical to SEQ ID NO: 3125
  misc_feature 1..60: note = source = /note="Description of Artificial Sequence: Synthetic oligonucleotide"
  source 1..60: mol_type = other DNA

SEQ ID NO: 3135 - DNA, 60 bp, synthetic construct; identical to SEQ ID NO: 3125
  misc_feature 1..60: note = source = /note="Description of Artificial Sequence: Synthetic oligonucleotide"
  source 1..60: mol_type = other DNA

SEQ ID NO: 3136 - DNA, 60 bp, synthetic construct; identical to SEQ ID NO: 3125
  misc_feature 1..60: note = source = /note="Description of Artificial Sequence: Synthetic oligonucleotide"
  source 1..60: mol_type = other DNA

SEQ ID NO: 3137 - DNA, 60 bp, synthetic construct; identical to SEQ ID NO: 3125
  misc_feature 1..60: note = source = /note="Description of Artificial Sequence: Synthetic oligonucleotide"
  source 1..60: mol_type = other DNA

SEQ ID NO: 3138 - DNA, 60 bp, synthetic construct
  misc_feature 1..60: note = source = /note="Description of Artificial Sequence: Synthetic oligonucleotide"
  source 1..60: mol_type = other DNA
gggggtgattacgttttcgggagttatcgtccctactactactactacggtatggacgtc

SEQ ID NO: 3139 - DNA, 60 bp, synthetic construct; identical to SEQ ID NO: 3138
  misc_feature 1..60: note = source = /note="Description of Artificial Sequence: Synthetic oligonucleotide"
  source 1..60: mol_type = other DNA

SEQ ID NO: 3140 - DNA, 36 bp, synthetic construct; identical to SEQ ID NO: 3124
  misc_feature 1..36: note = source = /note="Description of Artificial Sequence: Synthetic oligonucleotide"
  source 1..36: mol_type = other DNA

SEQ ID NO: 3141 - protein, 466 aa, Homo sapiens
MTTSPILQLLLRLSLCGLLLQRAETGSKGQTAGELYQRWERYRRECQETLAAAEPPSGLACNGSFDMYVCWDYAAPNATARASCPWYLPWHHHVAAGFVLRQCGSDGQWGLWRDHTQCENPEKNEAFLDQRLILERLQVMYTVGYSLSLATLLLALLILSLFRRLHCTRNYIHINLFTSFMLRAAAILSRDRLLPRPGPYLGDQALALWNQALAACRTAQIVTQYCVGANYTWLLVEGVYLHSLLVLVGGSEEGHFRYYLLLGWGAPALFVIPWVIVRYLYENTQCWERNEVKAIWWIIRTPILMTILINFLIFIRILGILLSKLRTRQMRCRDYRLRLARSTLTLVPLLGVHEVVFAPVTEEQARGALRFAKLGFEIFLSSFQGFLVSVLYCFINKEVQSEIRRGWHHCRLRRSLGEEQRQLPERAFRALPSGSGPGEVPTSRGLSSGTLPGPGNEASRELESYC

SEQ ID NO: 3142 - DNA, 2024 bp, Homo sapiens
  source 1..2024: mol_type = other DNA
ggcagcggtggcaggggctgcaggagcaagtgaccaggagcaggactggggacaggcctgatcgcccctgcacgaaccagacccttcgccgccctcacgatgactacctctccgatcctgcagctgctgctgcggctctcactgtgcgggctgctgctccagagggcggagacaggctctaaggggcagacggcgggggagctgtaccagcgctgggaacggtaccgcagggagtgccaggagaccttggcagccgcggaaccgccttcaggcctcgcctgtaacgggtccttcgatatgtacgtctgctgggactatgctgcacccaatgccactgcccgtgcgtcctgcccctggtacctgccctggcaccaccatgtggctgcaggtttcgtcctccgccagtgtggcagtgatggccaatggggactttggagagaccatacacaatgtgagaacccagagaagaatgaggcctttctggaccaaaggctcatcttggagcggttgcaggtcatgtacactgtcggctactccctgtctctcgccacactgctgctagccctgctcatcttgagtttgttcaggcggctacattgcactagaaactatatccacatcaacctgttcacgtctttcatgctgcgagctgcggccattctcagccgagaccgtctgctacctcgacctggcccctaccttggggaccaggcccttgcgctgtggaaccaggccctcgctgcctgccgcacggcccagatcgtgacccagtactgcgtgggtgccaactacacgtggctgctggtggagggcgtctacctgcacagtctcctggtgctcgtgggaggctccgaggagggccacttccgctactacctgctcctcggctggggggcccccgcgcttttcgtcattccctgggtgatcgtcaggtacctgtacgagaacacgcagtgctgggagcgcaacgaagtcaaggccatttggtggattatacggacccccatcctcatgaccatcttgattaatttcctcatttttatccgcattcttggcattctcctgtccaagctgaggacacggcaaatgcgctgccgggattaccggctgaggctggctcgctccacgctgacgctggtgcccctgctgggtgtccacgaggtggtgtttgctcccgtgacagaggaacaggcccggggcgccctgcgcttcgccaagctcggctttgagatcttcctcagctccttccagggcttcctggtcagcgtcctctactgcttcatcaacaaggaggtgcagtcggagatccgccgtggctggcaccactgccgcctgcgccgcagcctgggcgaggagcaacgccagctcccggagcgcgccttccgggccctgccctccggctccggcccgggcgaggtccccaccagccgcggcttgtcctcggggaccctcccagggcctgggaatgaggccagccgggagttggaaagttactgctagggggcgggatccccgtgtctgttcagttagcatggatttattgagtgccaactgcgtgccaggcccagtacggaggacgctggggaaatggtgaaggaaacagaaaaaaggtccctgcccttctggagatgacaactgagtggggaaaacagaccgtgaacacaaaacatcaagttccacacacgctatggaatggttatgaagggaagcgagaagggggcctagggtggtctgggaggcgtctccaaggaggtgacacttaagccatccccgaaagaggtgaaagagatcactttggggagagctggagaacaggattctaggcggaagcgatagcataggcaaaggcccttgggcaggaaggcgctcagccttggctggagtagaattaagtcagagccaacaggtggggagagacagagaagtgggcaggggcacccaagttgggatttcatttcaggtgcattggagattcttaggagtgtctcttgggggtaatattttattttttaaaaaatgaggat

SEQ ID NO: 3143 - protein, 430 aa, Homo sapiens
MTTSPILQLLLRLSLCGLLLQRAETGSKGQTAGELYQRWERYRRECQETLAAAEPPSVAAGFVLRQCGSDGQWGLWRDHTQCENPEKNEAFLDQRLILERLQVMYTVGYSLSLATLLLALLILSLFRRLHCTRNYIHINLFTSFMLRAAAILSRDRLLPRPGPYLGDQALALWNQALAACRTAQIVTQYCVGANYTWLLVEGVYLHSLLVLVGGSEEGHFRYYLLLGWGAPALFVIPWVIVRYLYENTQCWERNEVKAIWWIIRTPILMTILINFLIFIRILGILLSKLRTRQMRCRDYRLRLARSTLTLVPLLGVHEVVFAPVTEEQARGALRFAKLGFEIFLSSFQGFLVSVLYCFINKEVQSEIRRGWHHCRLRRSLGEEQRQLPERAFRALPSGSGPGEVPTSRGLSSGTLPGPGNEASRELESYC

SEQ ID NO: 3144 - DNA, 1290 bp, Homo sapiens
  source 1..1290: mol_type = other DNA
atgaccaccagcccgattctgcagctgctgctgcgcctgagcctgtgcggcctgctgctgcagcgcgcggaaaccggcagcaaaggccagaccgcgggcgaactgtatcagcgctgggaacgctatcgccgcgaatgccaggaaaccctggcggcggcggaaccgccgagcgtggcggcgggctttgtgctgcgccagtgcggcagcgatggccagtggggcctgtggcgcgatcatacccagtgcgaaaacccggaaaaaaacgaagcgtttctggatcagcgcctgattctggaacgcctgcaggtgatgtataccgtgggctatagcctgagcctggcgaccctgctgctggcgctgctgattctgagcctgtttcgccgcctgcattgcacccgcaactatattcatattaacctgtttaccagctttatgctgcgcgcggcggcgattctgagccgcgatcgcctgctgccgcgcccgggcccgtatctgggcgatcaggcgctggcgctgtggaaccaggcgctggcggcgtgccgcaccgcgcagattgtgacccagtattgcgtgggcgcgaactatacctggctgctggtggaaggcgtgtatctgcatagcctgctggtgctggtgggcggcagcgaagaaggccattttcgctattatctgctgctgggctggggcgcgccggcgctgtttgtgattccgtgggtgattgtgcgctatctgtatgaaaacacccagtgctgggaacgcaacgaagtgaaagcgatttggtggattattcgcaccccgattctgatgaccattctgattaactttctgatttttattcgcattctgggcattctgctgagcaaactgcgcacccgccagatgcgctgccgcgattatcgcctgcgcctggcgcgcagcaccctgaccctggtgccgctgctgggcgtgcatgaagtggtgtttgcgccggtgaccgaagaacaggcgcgcggcgcgctgcgctttgcgaaactgggctttgaaatttttctgagcagctttcagggctttctggtgagcgtgctgtattgctttattaacaaagaagtgcagagcgaaattcgccgcggctggcatcattgccgcctgcgccgcagcctgggcgaagaacagcgccagctgccggaacgcgcgtttcgcgcgctgccgagcggcagcggcccgggcgaagtgccgaccagccgcggcctgagcagcggcaccctgccgggcccgggcaacgaagcgagccgcgaactggaaagctattgc

SEQ ID NO: 3145 - protein, 493 aa, Homo sapiens
MTTSPILQLLLRLSLCGLLLQRAETGSKGQTAGELYQRWERYRRECQETLAAAEPPSGLACNGSFDMYVCWDYAAPNATARASCPWYLPWHHHVAAGFVLRQCGSDGQWGLWRDHTQCENPEKNEAFLDQRLILERLQVMYTVGYSLSLATLLLALLILSLFRRLHCTRNYIHINLFTSFMLRAAAILSRDRLLPRPGPYLGDQALALWNQALAACRTAQIVTQYCVGANYTWLLVEGVYLHSLLVLVGGSEEGHFRYYLLLGWGAPALFVIPWVIVRYLYENTQCWERNEVKAIWWIIRTPILMTILINFLIFIRILGILLSKLRTRQMRCRDYRLRLARSTLTLVPLLGVHEVVFAPVTEEQARGALRFAKLGFEIFLSSFQGFLVSVLYCFINKEVGRDPAAAPALWRRRGTAPPLSAIVSQVQSEIRRGWHHCRLRRSLGEEQRQLPERAFRALPSGSGPGEVPTSRGLSSGTLPGPGNEASRELESYC

SEQ ID NO: 3146 - DNA, 1482 bp, Homo sapiens
  source 1..1482: mol_type = other DNA
atgaccaccagcccgattctgcagctgctgctgcgcctgagcctgtgcggcctgctgctgcagcgcgcggaaaccggcagcaaaggccagaccgcgggcgaactgtatcagcgctgggaacgctatcgccgcgaatgccaggaaaccctggcggcggcggaaccgccgagcggcctggcgtgcaacggcagctttgatatgtatgtgtgctgggattatgcggcgccgaacgcgaccgcgcgcgcgagctgcccgtggtatctgccgtggcatcatcatgtggcggcgggctttgtgctgcgccagtgcggcagcgatggccagtggggcctgtggcgcgatcatacccagtgcgaaaacccggaaaaaaacgaagcgtttctggatcagcgcctgattctggaacgcctgcaggtgatgtataccgtgggctatagcctgagcctggcgaccctgctgctggcgctgctgattctgagcctgtttcgccgcctgcattgcacccgcaactatattcatattaacctgtttaccagctttatgctgcgcgcggcggcgattctgagccgcgatcgcctgctgccgcgcccgggcccgtatctgggcgatcaggcgctggcgctgtggaaccaggcgctggcggcgtgccgcaccgcgcagattgtgacccagtattgcgtgggcgcgaactatacctggctgctggtggaaggcgtgtatctgcatagcctgctggtgctggtgggcggcagcgaagaaggccattttcgctattatctgctgctgggctggggcgcgccggcgctgtttgtgattccgtgggtgattgtgcgctatctgtatgaaaacacccagtgctgggaacgcaacgaagtgaaagcgatttggtggattattcgcaccccgattctgatgaccattctgattaactttctgatttttattcgcattctgggcattctgctgagcaaactgcgcacccgccagatgcgctgccgcgattatcgcctgcgcctggcgcgcagcaccctgaccctggtgccgctgctgggcgtgcatgaagtggtgtttgcgccggtgaccgaagaacaggcgcgcggcgcgctgcgctttgcgaaactgggctttgaaatttttctgagcagctttcagggctttctggtgagcgtgctgtattgctttattaacaaagaagtgggccgcgatccggcggcggcgccggcgctgtggcgccgccgcggcaccgcgccgccgctgagcgcgattgtgagccaggtgcagagcgaaattcgccgcggctggcatcattgccgcctgcgccgcagcctgggcgaagaacagcgccagctgccggaacgcgcgtttcgcgcgctgccgagcggcagcggcccgggcgaagtgccgaccagccgcggcctgagcagcggcaccctgccgggcccgggcaacgaagcgagccgcgaactggaaagctattgctaa

SEQ ID NO: 3147 - protein, 460 aa, Mus musculus
MPLRLLLLLLWLWGLQWAETDSEGQTTTGELYQRWEHYGQECQKMLETTEPPSGLACNGSFDMYACWNYTAANTTARVSCPWYLPWFRQVSAGFVFRQCGSDGQWGSWRDHTQCENPEKNGAFQDQTLILERLQIMYTVGYSLSLTTLLLALLILSLFRRLHCTRNYIHMNLFTSFMLRAAAILTRDQLLPPLGPYTGDQAPTPWNQALAACRTAQIMTQYCVGANYTWLLVEGVYLHHLLVIVGRSEKGHFRCYLLLGWGAPALFVIPWVIVRYLRENTQCWERNEVKAIWWIIRTPILITILINFLIFIRILGILVSKLRTRQMRCPDYRLRLARSTLTLVPLLGVHEVVFAPVTEEQVEGSLRFAKLAFEIFLSSFQGFLVSVLYCFINKEVQSEIRQGWRHRRLRLSLQEQRPRPHQELAPRAVPLSSACREAAVGNALPSGMLHVPGDEVLESYC

SEQ ID NO: 3148 - DNA, 1383 bp, Mus musculus
  source 1..1383: mol_type = other DNA
atgccgctgcgcctgctgctgctgctgctgtggctgtggggcctgcagtgggcggaaaccgatagcgaaggccagaccaccaccggcgaactgtatcagcgctgggaacattatggccaggaatgccagaaaatgctggaaaccaccgaaccgccgagcggcctggcgtgcaacggcagctttgatatgtatgcgtgctggaactataccgcggcgaacaccaccgcgcgcgtgagctgcccgtggtatctgccgtggtttcgccaggtgagcgcgggctttgtgtttcgccagtgcggcagcgatggccagtggggcagctggcgcgatcatacccagtgcgaaaacccggaaaaaaacggcgcgtttcaggatcagaccctgattctggaacgcctgcagattatgtataccgtgggctatagcctgagcctgaccaccctgctgctggcgctgctgattctgagcctgtttcgccgcctgcattgcacccgcaactatattcatatgaacctgtttaccagctttatgctgcgcgcggcggcgattctgacccgcgatcagctgctgccgccgctgggcccgtataccggcgatcaggcgccgaccccgtggaaccaggcgctggcggcgtgccgcaccgcgcagattatgacccagtattgcgtgggcgcgaactatacctggctgctggtggaaggcgtgtatctgcatcatctgctggtgattgtgggccgcagcgaaaaaggccattttcgctgctatctgctgctgggctggggcgcgccggcgctgtttgtgattccgtgggtgattgtgcgctatctgcgcgaaaacacccagtgctgggaacgcaacgaagtgaaagcgatttggtggattattcgcaccccgattctgattaccattctgattaactttctgatttttattcgcattctgggcattctggtgagcaaactgcgcacccgccagatgcgctgcccggattatcgcctgcgcctggcgcgcagcaccctgaccctggtgccgctgctgggcgtgcatgaagtggtgtttgcgccggtgaccgaagaacaggtggaaggcagcctgcgctttgcgaaactggcgtttgaaatttttctgagcagctttcagggctttctggtgagcgtgctgtattgctttattaacaaagaagtgcagagcgaaattcgccagggctggcgccatcgccgcctgcgcctgagcctgcaggaacagcgcccgcgcccgcatcaggaactggcgccgcgcgcggtgccgctgagcagcgcgtgccgcgaagcggcggtgggcaacgcgctgccgagcggcatgctgcatgtgccgggcgatgaagtgctggaaagctattgctaa

SEQ ID NO: 3149 - protein, 230 aa, Mus musculus
MPLRLLLLLLWLWGLQWAETDSEGQTTTGELYQRWEHYGQECQKMLETTEPPSGLACNGSFDMYACWNYTAANTTARVSCPWYLPWFRQVSAGFVFRQCGSDGQWGSWRDHTQCENPEKNGAFQDQTLILERLQIMYTVGYSLSLTTLLLALLILSLFRRLHCTRNYIHMNLFTSFMLRAAAILTRDQLLPPLGPYTGDQAPTPWNQVLHRLLPGGTKTFPIYFRTFPHH

SEQ ID NO: 3150 - DNA, 693 bp, Mus musculus
  source 1..693: mol_type = other DNA
atgccgctgcgcctgctgctgctgctgctgtggctgtggggcctgcagtgggcggaaaccgatagcgaaggccagaccaccaccggcgaactgtatcagcgctgggaacattatggccaggaatgccagaaaatgctggaaaccaccgaaccgccgagcggcctggcgtgcaacggcagctttgatatgtatgcgtgctggaactataccgcggcgaacaccaccgcgcgcgtgagctgcccgtggtatctgccgtggtttcgccaggtgagcgcgggctttgtgtttcgccagtgcggcagcgatggccagtggggcagctggcgcgatcatacccagtgcgaaaacccggaaaaaaacggcgcgtttcaggatcagaccctgattctggaacgcctgcagattatgtataccgtgggctatagcctgagcctgaccaccctgctgctggcgctgctgattctgagcctgtttcgccgcctgcattgcacccgcaactatattcatatgaacctgtttaccagctttatgctgcgcgcggcggcgattctgacccgcgatcagctgctgccgccgctgggcccgtataccggcgatcaggcgccgaccccgtggaaccaggtgctgcatcgcctgctgccgggcggcaccaaaacctttccgatttattttcgcacctttccgcatcattaa

SEQ ID NO: 3151 - protein, 42 aa, Homo sapiens
YAEGTFISDYSIAMDKIHQQDFVNWLLAQKGKKNDWKHNITQ

SEQ ID NO: 3152 - DNA, 126 bp, Homo sapiens
  source 1..126: mol_type = other DNA
tatgcggaaggcacctttattagcgattatagcattgcgatggataaaattcatcagcaggattttgtgaactggctgctggcgcagaaaggcaaaaaaaacgattggaaacataacattacccag

SEQ ID NO: 3153 - protein, 42 aa, Mus musculus
YAEGTFISDYSIAMDKIRQQDFVNWLLAQRGKKSDWKHNITQ

SEQ ID NO: 3154 - DNA, 126 bp, Mus musculus
  source 1..126: mol_type = other DNA
tatgcggaaggcacctttattagcgattatagcattgcgatggataaaattcgccagcaggattttgtgaactggctgctggcgcagcgcggcaaaaaaagcgattggaaacataacattacccag

SEQ ID NO: 3155 - protein, 42 aa, Rattus sp.
YAEGTFISDYSIAMDKIRQQDFVNWLLAQKGKKNDWKHNLTQ

SEQ ID NO: 3156 - DNA, 126 bp, Rattus sp.
  source 1..126: mol_type = other DNA
tatgcggaaggcacctttattagcgattatagcattgcgatggataaaattcgccagcaggattttgtgaactggctgctggcgcagaaaggcaaaaaaaacgattggaaacataacctgacccag

SEQ ID NO: 3157 - protein, 22 aa, Homo sapiens
MDMRVPAQLLGLLLLWLRGARC

SEQ ID NO: 3158 - DNA, 66 bp, Homo sapiens
  source 1..66: mol_type = other DNA
atggacatgagagtgcctgcacagctgctgggcctgctgctgctgtggctgagaggcgccagatgc

SEQ ID NO: 3159 - protein, 19 aa, Homo sapiens
MAWALLLLTLLTQGTGSWA

SEQ ID NO: 3160 - DNA, 57 bp, Homo sapiens
  source 1..57: mol_type = other DNA
atggcctgggctctgctgctcctcaccctcctcactcagggcacagggtcctgggcc

SEQ ID NO: 3161-3162 - skipped (2 entries)

SEQ ID NO: 3163 - protein, 39 aa, Heloderma suspectum
HGEGTFTSDLSKQMEEEAVRLFIEWLKNGGPSSGAPPPS

SEQ ID NO: 3164 - protein, 39 aa, Heloderma horridum
HSDGTFTSDLSKQMEEEAVRLFIEWLKNGGPSSGAPPPS

SEQ ID NO: 3165 - protein, 39 aa, Heloderma suspectum
HGEGTFTSDLSKQLEEEAVRLFIEWLKNGGPSSGAPPPS

SEQ ID NO: 3166 - protein, 39 aa, Heloderma suspectum
HGEGTFTSDLSKQLEEEAVRLFIEFLKNGGPSSGAPPPS

SEQ ID NO: 3167 - protein, 39 aa, Heloderma suspectum
HGEGTFTSDLSKQLEEEAARLFIEFLKNGGPSSGAPPPS

SEQ ID NO: 3168 - protein, 30 aa, Heloderma suspectum
HGEGTFTSDLSKQMEEEAVRLFIEWLKNGG

SEQ ID NO: 3169 - protein, 30 aa, Heloderma suspectum
HGEGTFTSDLSKQLEEEAVRLFIEWLKNGG

SEQ ID NO: 3170 - protein, 30 aa, Heloderma suspectum
HGEGTFTSDLSKQLEEEAVRLFIEFLKNGG

SEQ ID NO: 3171 - protein, 30 aa, Heloderma suspectum
HGEGTFTSDLSKQLEEEAARLFIEFLKNGG

SEQ ID NO: 3172 - protein, 28 aa, Heloderma suspectum
HGEGTFTSDLSKQMEEEAVRLFIEWLKN

SEQ ID NO: 3173 - protein, 28 aa, Heloderma suspectum
HGEGTFTSDLSKQLEEEAVRLFIEWLKN

SEQ ID NO: 3174 - protein, 28 aa, Heloderma suspectum
HGEGTFTSDLSKQLEEEAVRLFIEFLKN

SEQ ID NO: 3175 - protein, 28 aa, Heloderma suspectum
HGEGTFTSDLSKQLEEEAARLFIEFLKN

SEQ ID NO: 3176 - protein, 39 aa, Heloderma suspectum
HGEGTFTSDLSKQLEEKAAKEFIEFLKQGGPSSGAPPPS

SEQ ID NO: 3177 - protein, 39 aa, Heloderma suspectum
HGEGTFTSDLSKQLEEKAAKEFIEWLKQGGPSSGAPPPS

SEQ ID NO: 3178 - protein, 37 aa, Heloderma suspectum
HGEFTFTSDLSKQLEEEAVRLFIEWLKQGGPSKEIIS

SEQ ID NO: 3179 - protein, 39 aa, Heloderma suspectum
HGEFTFTSDLSKQLEEKAAKEFIEWLKQGGPSSGAPPPS

SEQ ID NO: 3180 - protein, 39 aa, Heloderma suspectum
HGEGTFTSDLVKILEAEAVRKFIEFLKNGGPSSGAPPPS

SEQ ID NO: 3181 - protein, 40 aa, Heloderma suspectum
HGEGTFTSDLSKQMEEEAVRLFIEWLKNGGPSSGAPPPSK

SEQ ID NO: 3182 - protein, 31 aa, Homo sapiens
HAEGTFTSDVSSYLEGQAAKEFIAWLVKGRG

SEQ ID NO: 3183 - protein, 31 aa, synthetic construct; identical to SEQ ID NO: 3182
  VARIANT 2: note = /replace="Val" or "Gly"
  VARIANT 16: note = /replace="Lys" or "Glu"
  VARIANT 17: note = /replace="Lys"
  VARIANT 24: note = /replace="Glu"
  VARIANT 27: note = /replace="Lys"
  VARIANT 28: note = /replace="Asn" or "Arg"
  VARIANT 30: note = /replace="Gly"
  VARIANT 31: note = /replace="His" or "Pro" or " "
  SITE 1..31: note = /note="Variant residues given in the sequence have no preference with respect to those in the annotations for variant positions"
  REGION 1..31: note = source = /note="Description of Artificial Sequence: Synthetic polypeptide"

SEQ ID NO: 3184 - protein, 31 aa, synthetic construct
  REGION 1..31: note = source = /note="Description of Artificial Sequence: Synthetic polypeptide"
HAEGTFTSDVSSYLEGQAAKEFIAWLVRGRG

SEQ ID NO: 3185 - protein, 31 aa, synthetic construct
  REGION 1..31: note = source = /note="Description of Artificial Sequence: Synthetic polypeptide"
HAEGTFTSDVSSYLEGQAAKEFIEWLVKGRG

SEQ ID NO: 3186 - protein, 31 aa, synthetic construct
  REGION 1..31: note = source = /note="Description of Artificial Sequence: Synthetic polypeptide"
HAEGTFTSDVSSYLEKQAAKEFIAWLVKGRG

SEQ ID NO: 3187 - protein, 31 aa, synthetic construct
  REGION 1..31: note = source = /note="Description of Artificial Sequence: Synthetic polypeptide"
HGEGTFTSDVSSYLEEQAAKEFIAWLVKGGG

SEQ ID NO: 3188 - protein, 31 aa, synthetic construct
  REGION 1..31: note = source = /note="Description of Artificial Sequence: Synthetic polypeptide"
HVEGTFTSDVSSYLEEQAAKEFIAWLVKGGG

SEQ ID NO: 3189 - protein, 31 aa, synthetic construct
  REGION 1..31: note = source = /note="Description of Artificial Sequence: Synthetic polypeptide"
HGEGTFTSDVSSYLEEQAAKEFIAWLKNGGG

SEQ ID NO: 3190 - protein, 31 aa, synthetic construct
  REGION 1..31: note = source = /note="Description of Artificial Sequence: Synthetic polypeptide"
HVEGTFTSDVSSYLEEQAAKEFIAWLKNGGG

SEQ ID NO: 3191 - protein, 31 aa, synthetic construct
  REGION 1..31: note = source = /note="Description of Artificial Sequence: Synthetic polypeptide"
HGEGTFTSDVSSYLEEQAAKEFIAWLVKGGP

SEQ ID NO: 3192 - protein, 31 aa, synthetic construct
  REGION 1..31: note = source = /note="Description of Artificial Sequence: Synthetic polypeptide"
HVEGTFTSDVSSYLEEQAAKEFIAWLVKGGP

SEQ ID NO: 3193 - protein, 31 aa, synthetic construct
  REGION 1..31: note = source = /note="Description of Artificial Sequence: Synthetic polypeptide"
HGEGTFTSDVSSYLEEQAAKEFIAWLKNGGP

SEQ ID NO: 3194 - protein, 31 aa, synthetic construct
  REGION 1..31: note = source = /note="Description of Artificial Sequence: Synthetic polypeptide"
HVEGTFTSDVSSYLEEQAAKEFIAWLKNGGP

SEQ ID NO: 3195 - protein, 30 aa, synthetic construct
  REGION 1..30: note = source = /note="Description of Artificial Sequence: Synthetic polypeptide"
HGEGTFTSDVSSYLEEQAAKEFIAWLVKGG

SEQ ID NO: 3196 - protein, 30 aa, synthetic construct
  REGION 1..30: note = source = /note="Description of Artificial Sequence: Synthetic polypeptide"
HVEGTFTSDVSSYLEEQAAKEFIAWLVKGG

SEQ ID NO: 3197 - protein, 30 aa, synthetic construct
  REGION 1..30: note = source = /note="Description of Artificial Sequence: Synthetic polypeptide"
HVEGTFTSDVSSYLEEQAAKEFIAWLVNGG

SEQ ID NO: 3198 - protein, 30 aa, synthetic construct
  REGION 1..30: note = source = /note="Description of Artificial Sequence: Synthetic polypeptide"
HGEGTFTSDVSSYLEEQAAKEFIAWLVNGG

SEQ ID NO: 3199 - protein, 40 aa, synthetic construct
  VARIANT 2: note = /replace="D-Ala" or "Val" or "Leu" or "Ile" "Ser" or "Thr"
  VARIANT 16: note = /replace="Glu" or "Asp" or "Lys"
  VARIANT 27: note = /replace="Ile"
  SITE 1..40: note = /note="Variant residues given in the sequence have no preference with respect to those in the annotations for variant positions"
  REGION 1..40: note = source = /note="Description of Artificial Sequence: Synthetic polypeptide"
HGEGTFTSDVSSYLEGQAAKEFIAWLVKGGPSSGAPPPCC

SEQ ID NO: 3200 - protein, 40 aa, synthetic construct
  REGION 1..40: note = source = /note="Description of Artificial Sequence: Synthetic polypeptide"
HVEGTFTSDVSSYLEEQAAKEFIAWLIKGGPSSGAPPPCC

SEQ ID NO: 3201 - protein, 31 aa, synthetic construct; identical to SEQ ID NO: 3187
  REGION 1..31: note = source = /note="Description of Artificial Sequence: Synthetic polypeptide"

SEQ ID NO: 3202 - protein, 31 aa, Homo sapiens; identical to SEQ ID NO: 3182

SEQ ID NO: 3203 - protein, 30 aa, synthetic construct
  REGION 1..30: note = source = /note="Description of Artificial Sequence: Synthetic polypeptide"
AEGTFTSDVSSYLEGQAAKEFIAWLVKGRG

SEQ ID NO: 3204 - protein, 29 aa, synthetic construct
  REGION 1..29: note = source = /note="Description of Artificial Sequence: Synthetic peptide"
EGTFTSDVSSYLEGQAAKEFIAWLVKGRG

SEQ ID NO: 3205 - protein, 31 aa, synthetic construct
  REGION 1..31: note = source = /note="Description of Artificial Sequence: Synthetic polypeptide"
HGEGTFTSDVSSYLEGQAAKEFIAWLVKGRG

SEQ ID NO: 3206 - protein, 30 aa, synthetic construct
  REGION 1..30: note = source = /note="Description of Artificial Sequence: Synthetic polypeptide"
HGEGTFTSDVSSYLEGQAAKEFIAWLVKGR

SEQ ID NO: 3207 - protein, 31 aa, synthetic construct
  REGION 1..31: note = source = /note="Description of Artificial Sequence: Synthetic polypeptide"
HLEGTFTSDVSSYLEGQAAKEFIAWLVKGRG

SEQ ID NO: 3208 - protein, 22 aa, synthetic construct
  REGION 1..22: note = source = /note="Description of Artificial Sequence: Synthetic peptide"
HGEGTFTSDLSKQMEEEAVRLF

SEQ ID NO: 3209 - protein, 23 aa, synthetic construct
  REGION 1..23: note = source = /note="Description of Artificial Sequence: Synthetic peptide"
HGEGTFTSDLSKQMEEEAVRLFI

SEQ ID NO: 3210 - protein, 31 aa, synthetic construct
  REGION 1..31: note = source = /note="Description of Artificial Sequence: Synthetic polypeptide"
HGEGTFTSDVSSYLEGQAAKEFIAWLVKGGG

SEQ ID NO: 3211 - protein, 31 aa, synthetic construct
  REGION 1..31: note = source = /note="Description of Artificial Sequence: Synthetic polypeptide"
HGEGTFTSDLSKQMEEEAVRLAAQAAQQGGG

SEQ ID NO: 3212 - protein, 31 aa, synthetic construct
  REGION 1..31: note = source = /note="Description of Artificial Sequence: Synthetic polypeptide"
HSEGTFTSDVSSYLEEQAAKEFIAWLVKGGG

SEQ ID NO: 3213 - protein, 31 aa, synthetic construct
  REGION 1..31: note = source = /note="Description of Artificial Sequence: Synthetic polypeptide"
HSQGTFTSDVSSYLEEQAAKEFIAWLVKGGG

SEQ ID NO: 3214 - protein, 31 aa, synthetic construct
  REGION 1..31: note = source = /note="Description of Artificial Sequence: Synthetic polypeptide"
HGDGTFTSDVSSYLEEQAAKEFIAWLVKGGG

SEQ ID NO: 3215 - protein, 31 aa, synthetic construct
  REGION 1..31: note = source = /note="Description of Artificial Sequence: Synthetic polypeptide"
HSDGTFTSDVSSYLEEQAAKEFIAWLVKGGG

SEQ ID NO: 3216 - protein, 31 aa, synthetic construct
  REGION 1..31: note = source = /note="Description of Artificial Sequence: Synthetic polypeptide"
HSEGTFTSDVSSYLEEQAAKEFIEWLVKGGG

SEQ ID NO: 3217 - protein, 31 aa, synthetic construct
  REGION 1..31: note = source = /note="Description of Artificial Sequence: Synthetic polypeptide"
HSQGTFTSDVSSYLEEQAAKEFIEWLVKGGG

SEQ ID NO: 3218 - protein, 31 aa, synthetic construct
  REGION 1..31: note = source = /note="Description of Artificial Sequence: Synthetic polypeptide"
HGDGTFTSDVSSYLEEQAAKEFIEWLVKGGG

SEQ ID NO: 3219 - protein, 31 aa, synthetic construct
  REGION 1..31: note = source = /note="Description of Artificial Sequence: Synthetic polypeptide"
HSDGTFTSDVSSYLEEQAAKEFIEWLVKGGG

SEQ ID NO: 3220 - protein, 31 aa, synthetic construct; identical to SEQ ID NO: 3189
  REGION 1..31: note = source = /note="Description of Artificial Sequence: Synthetic polypeptide"

SEQ ID NO: 3221 - protein, 31 aa, synthetic construct
  REGION 1..31: note = source = /note="Description of Artificial Sequence: Synthetic polypeptide"
HSEGTFTSDVSSYLEEQAAKEFIAWLKNGGG

SEQ ID NO: 3222 - protein, 31 aa, synthetic construct
  REGION 1..31: note = source = /note="Description of Artificial Sequence: Synthetic polypeptide"
HSQGTFTSDVSSYLEEQAAKEFIAWLKNGGG

SEQ ID NO: 3223 - protein, 31 aa, synthetic construct
  REGION 1..31: note = source = /note="Description of Artificial Sequence: Synthetic polypeptide"
HGDGTFTSDVSSYLEEQAAKEFIAWLKNGGG

SEQ ID NO: 3224 - protein, 31 aa, synthetic construct
  REGION 1..31: note = source = /note="Description of Artificial Sequence: Synthetic polypeptide"
HSDGTFTSDVSSYLEEQAAKEFIAWLKNGGG

SEQ ID NO: 3225 - protein, 31 aa, synthetic construct
  REGION 1..31: note = source = /note="Description of Artificial Sequence: Synthetic polypeptide"
HSEGTFTSDVSSYLEEQAAKEFIEWLKNGGG

SEQ ID NO: 3226 - protein, 31 aa, synthetic construct
  REGION 1..31: note = source = /note="Description of Artificial Sequence: Synthetic polypeptide"
HSQGTFTSDVSSYLEEQAAKEFIEWLKNGGG

SEQ ID NO: 3227 - protein, 31 aa, synthetic construct
  REGION 1..31: note = source = /note="Description of Artificial Sequence: Synthetic polypeptide"
HGDGTFTSDVSSYLEEQAAKEFIEWLKNGGG

SEQ ID NO: 3228 - protein, 31 aa, synthetic construct
  REGION 1..31: note = source = /note="Description of Artificial Sequence: Synthetic polypeptide"
HSDGTFTSDVSSYLEEQAAKEFIEWLKNGGG

SEQ ID NO: 3229 - protein, 31 aa, synthetic construct
  REGION 1..31: note = source = /note="Description of Artificial Sequence: Synthetic polypeptide"
HGEGTFTSDVSSYLEEQAAKEFIEWLKNEGG

SEQ ID NO: 3230 - protein, 31 aa, synthetic construct
  REGION 1..31: note = source = /note="Description of Artificial Sequence: Synthetic polypeptide"
HSEGTFTSDVSSYLEEQAAKEFIEWLKNEGG

SEQ ID NO: 3231 - protein, 31 aa, synthetic construct
  REGION 1..31: note = source = /note="Description of Artificial Sequence: Synthetic polypeptide"
HGEGTFTSDVSSYLEEQAAKEFIEWLKNPGG

SEQ ID NO: 3232 - protein, 31 aa, synthetic construct
  REGION 1..31: note = source = /note="Description of Artificial Sequence: Synthetic polypeptide"
HSEGTFTSDVSSYLEEQAAKEFIEWLKNPGG

SEQ ID NO: 3233 - protein, 31 aa, synthetic construct
  REGION 1..31: note = source = /note="Description of Artificial Sequence: Synthetic polypeptide"
HGEGTFTSDVSSYLEEQAAKEFIEWLKNQGG

SEQ ID NO: 3234 - protein, 31 aa, synthetic construct
  REGION 1..31: note = source = /note="Description of Artificial Sequence: Synthetic polypeptide"
HSEGTFTSDVSSYLEEQAAKEFIEWLKNQGG

SEQ ID NO: 3235 - protein, 31 aa, synthetic construct
  REGION 1..31: note = source = /note="Description of Artificial Sequence: Synthetic polypeptide"
HGEGTFTSDVSSYLEEQAAKEFIEWLKNTGG

SEQ ID NO: 3236 - protein, 31 aa, synthetic construct
  REGION 1..31: note = source = /note="Description of Artificial Sequence: Synthetic polypeptide"
HSEGTFTSDVSSYLEEQAAKEFIEWLKNTGG

SEQ ID NO: 3237 - protein, 31 aa, synthetic construct
  REGION 1..31: note = source = /note="Description of Artificial Sequence: Synthetic polypeptide"
HGEGTFTSDVSSYLEEQAAKEFIEWLKNVGG

SEQ ID NO: 3238 - protein, 31 aa, synthetic construct
  REGION 1..31: note = source = /note="Description of Artificial Sequence: Synthetic polypeptide"
HSEGTFTSDVSSYLEEQAAKEFIEWLKNVGG

SEQ ID NO: 3239 - protein, 31 aa, synthetic construct
  REGION 1..31: note = source = /note="Description of Artificial Sequence: Synthetic polypeptide"
HGEGTFTSDVSSYLEEQAAKEFIEWLKQGGG

SEQ ID NO: 3240 - protein, 31 aa, synthetic construct
  REGION 1..31: note = source = /note="Description of Artificial Sequence: Synthetic polypeptide"
HSEGTFTSDVSSYLEEQAAKEFIEWLKQGGG

SEQ ID NO: 3241 - protein, 31 aa, synthetic construct; identical to SEQ ID NO: 3187
  REGION 1..31: note = source = /note="Description of Artificial Sequence: Synthetic polypeptide"

SEQ ID NO: 3242 - protein, 31 aa, synthetic construct
  MOD_RES 12: note = Any amino acid
  REGION 1..31: note = source = /note="Description of Artificial Sequence: Synthetic polypeptide"
HGEGTFTSDVSXYLEEQAAKEFIAWLVKGGG

SEQ ID NO: 3243 - protein, 31 aa, synthetic construct
  REGION 1..31: note = source = /note="Description of Artificial Sequence: Synthetic polypeptide"
HVEGTFTSDVSSYLEGQAAKEFIAWLVKGGG

SEQ ID NO: 3244 - protein, 31 aa, synthetic construct
  REGION 1..31: note = source = /note="Description of Artificial Sequence: Synthetic polypeptide"
HSEGTFTSDVSSYLEGQAAKEFIAWLVKGGG

SEQ ID NO: 3245 - protein, 31 aa, synthetic construct
  REGION 1..31: note = source = /note="Description of Artificial Sequence: Synthetic polypeptide"
HGQGTFTSDVSSYLEGQAAKEFIAWLVKGGG

SEQ ID NO: 3246 - protein, 31 aa, synthetic construct
  REGION 1..31: note = source = /note="Description of Artificial Sequence: Synthetic polypeptide"
HVQGTFTSDVSSYLEGQAAKEFIAWLVKGGG

SEQ ID NO: 3247 - protein, 31 aa, synthetic construct
  REGION 1..31: note = source = /note="Description of Artificial Sequence: Synthetic polypeptide"
HSQGTFTSDVSSYLEGQAAKEFIAWLVKGGG

SEQ ID NO: 3248 - protein, 31 aa, synthetic construct
  REGION 1..31: note = source = /note="Description of Artificial Sequence: Synthetic polypeptide"
HVDGTFTSDVSSYLEGQAAKEFIAWLVKGGG

SEQ ID NO: 3249 - protein, 31 aa, synthetic construct
  REGION 1..31: note = source = /note="Description of Artificial Sequence: Synthetic polypeptide"
HGHGTFTSDVSSYLEGQAAKEFIAWLVKGGG

SEQ ID NO: 3250 - protein, 31 aa, synthetic construct
  REGION 1..31: note = source = /note="Description of Artificial Sequence: Synthetic polypeptide"
HVHGTFTSDVSSYLEGQAAKEFIAWLVKGGG

SEQ ID NO: 3251 - protein, 31 aa, synthetic construct
  REGION 1..31: note = source = /note="Description of Artificial Sequence: Synthetic polypeptide"
HSHGTFTSDVSSYLEGQAAKEFIAWLVKGGG

SEQ ID NO: 3252 - protein, 31 aa, synthetic construct
  REGION 1..31: note = source = /note="Description of Artificial Sequence: Synthetic polypeptide"
HGDGTFTSDVSSYLEGQAAKEFIAWLVKGGG

SEQ ID NO: 3253 - protein, 31 aa, synthetic construct
  REGION 1..31: note = source = /note="Description of Artificial Sequence: Synthetic polypeptide"
HSDGTFTSDVSSYLEGQAAKEFIAWLVKGGG

SEQ ID NO: 3254 - protein, 31 aa, synthetic construct
  REGION 1..31: note = source = /note="Description of Artificial Sequence: Synthetic polypeptide"
HGEGTFTSDVSSYLEEQAAKEFIEWLKNGGG

SEQ ID NO: 3255 - protein, 31 aa, synthetic construct
  REGION 1..31: note = source = /note="Description of Artificial Sequence: Synthetic polypeptide"
HGEGTFTSDVSSYLEEQAAKEFIEWLVKGGG

SEQ ID NO: 3256 - protein, 31 aa, synthetic construct
  REGION 1..31: note = source = /note="Description of Artificial Sequence: Synthetic polypeptide"
HGEGTFTSDYSSYLEEQAAKEFIEWLKNGGG

SEQ ID NO: 3257 - protein, 31 aa, synthetic construct
  REGION 1..31: note = source = /note="Description of Artificial Sequence: Synthetic polypeptide"
HGEGTFTSEVSSYLEGQAAKEFIEWLKNGGG

SEQ ID NO: 3258 - protein, 32 aa, synthetic construct
  REGION 1..32: note = source = /note="Description of Artificial Sequence: Synthetic polypeptide"
HSEGTFTSDLSKQMEEEAVRLFAAQAAQQGGG

SEQ ID NO: 3259 - protein, 32 aa, synthetic construct
  REGION 1..32: note = source = /note="Description of Artificial Sequence: Synthetic polypeptide"
HSQGTFTSDLSKQMEEEAVRLFAAQAAQQGGG

SEQ ID NO: 3260 - protein, 32 aa, synthetic construct
  REGION 1..32: note = source = /note="Description of Artificial Sequence: Synthetic polypeptide"
HGDGTFTSDLSKQMEEEAVRLFAAQAAQQGGG

SEQ ID NO: 3261 - protein, 32 aa, synthetic construct
  REGION 1..32: note = source = /note="Description of Artificial Sequence: Synthetic polypeptide"
HSDGTFTSDLSKQMEEEAVRLFAAQAAQQGGG

SEQ ID NO: 3262 - protein, 32 aa, synthetic construct
  REGION 1..32: note = source = /note="Description of Artificial Sequence: Synthetic polypeptide"
HGEGTFTSDLSKQMEEEAVRLFAAQAAQQGGG

SEQ ID NO: 3263 - protein, 30 aa, synthetic construct; identical to SEQ ID NO: 3168
  REGION 1..30: note = source = /note="Description of Artificial Sequence: Synthetic polypeptide"

SEQ ID NO: 3264 - protein, 30 aa, synthetic construct
  REGION 1..30: note = source = /note="Description of Artificial Sequence: Synthetic polypeptide"
HGEGTFTSDVSSYLEGEAVRLFIEWLKNGG

SEQ ID NO: 3265 - protein, 39 aa, synthetic construct; identical to SEQ ID NO: 3163
  REGION 1..39: note = source = /note="Description of Artificial Sequence: Synthetic polypeptide"

SEQ ID NO: 3266 - protein, 39 aa, synthetic construct
  REGION 1..39: note = source = /note="Description of Artificial Sequence: Synthetic polypeptide"
HGEGTFTSDVSSYLEGEAVRLFIEWLKNGGPSSGAPPPS

SEQ ID NO: 3267 - protein, 32 aa, synthetic construct
  REGION 1..32: note = source = /note="Description of Artificial Sequence: Synthetic polypeptide"
HHGEGTFTSDVSSYLEEQAAKEFIEWLKNGGG

SEQ ID NO: 3268 - protein, 32 aa, synthetic construct
  REGION 1..32: note = source = /note="Description of Artificial Sequence: Synthetic polypeptide"
HHGEGTFTSDVSSYLEEQAAKEFIEWLKDGGG

SEQ ID NO: 3269 - protein, 32 aa, synthetic construct
  REGION 1..32: note = source = /note="Description of Artificial Sequence: Synthetic polypeptide"
HHGEGTFTSDVSSYLEEQAAKEFIEWLKQGGG

SEQ ID NO: 3270 - protein, 32 aa, synthetic construct
  REGION 1..32: note = source = /note="Description of Artificial Sequence: Synthetic polypeptide"
HHGEGTFTSDVSSYLEEQAAKEFIEWLKNQGG

SEQ ID NO: 3271 - protein, 32 aa, synthetic construct
  REGION 1..32: note = source = /note="Description of Artificial Sequence: Synthetic polypeptide"
HHGEGTFTSDVSSYLEEQAAKEFIEWLKNTGG

SEQ ID NO: 3272 - protein, 32 aa, synthetic construct
  REGION 1..32: note = source = /note="Description of Artificial Sequence: Synthetic polypeptide"
HHGEGTFTSDVSSYLEEQAAKEFIEWLKNVGG

SEQ ID NO: 3273 - protein, 32 aa, synthetic construct
  REGION 1..32: note = source = /note="Description of Artificial Sequence: Synthetic polypeptide"
HHGEGTFTSDVSSYLEEQAAKEFIEWLKNPGG

SEQ ID NO: 3274 - protein, 32 aa, synthetic construct
  REGION 1..32: note = source = /note="Description of Artificial Sequence: Synthetic polypeptide"
HHGEGTFTSDVSSYLEEQAAKEFIEWLKNEGG

SEQ ID NO: 3275 - protein, 29 aa, synthetic construct
  REGION 1..29: note = source = /note="Description of Artificial Sequence: Synthetic peptide"
HGAGTFTSDVSSYLEGQAAKEFIAWLVKG

SEQ ID NO: 3276 - protein, 29 aa, synthetic construct
  REGION 1..29: note = source = /note="Description of Artificial Sequence: Synthetic peptide"
HGDGTFTSDVSSYLEGQAAKEFIAWLVKG

SEQ ID NO: 3277 - protein, 29 aa, synthetic construct
  REGION 1..29: note = source = /note="Description of Artificial Sequence: Synthetic peptide"
HGLGTFTSDVSSYLEGQAAKEFIAWLVKG

SEQ ID NO: 3278 - protein, 29 aa, synthetic construct
  REGION 1..29: note = source = /note="Description of Artificial Sequence: Synthetic peptide"
HGVGTFTSDVSSYLEGQAAKEFIAWLVKG

SEQ ID NO: 3279 - protein, 29 aa, synthetic construct
  REGION 1..29: note = source = /note="Description of Artificial Sequence: Synthetic peptide"
HGFGTFTSDVSSYLEGQAAKEFIAWLVKG

SEQ ID NO: 3280 - protein, 29 aa, synthetic construct
  REGION 1..29: note = source = /note="Description of Artificial Sequence: Synthetic peptide"
HGYGTFTSDVSSYLEGQAAKEFIAWLVKG

SEQ ID NO: 3281 - protein, 29 aa, synthetic construct
  REGION 1..29: note = source = /note="Description of Artificial Sequence: Synthetic peptide"
HGTGTFTSDVSSYLEGQAAKEFIAWLVKG

SEQ ID NO: 3282 - protein, 29 aa, synthetic construct
  REGION 1..29: note = source = /note="Description of Artificial Sequence: Synthetic peptide"
HGNGTFTSDVSSYLEGQAAKEFIAWLVKG

SEQ ID NO: 3283 - protein, 29 aa, synthetic construct
  REGION 1..29: note = source = /note="Description of Artificial Sequence: Synthetic peptide"
HGHGTFTSDVSSYLEGQAAKEFIAWLVKG

SEQ ID NO: 3284 - protein, 29 aa, synthetic construct
  REGION 1..29: note = source = /note="Description of Artificial Sequence: Synthetic peptide"
HGKGTFTSDVSSYLEGQAAKEFIAWLVKG

SEQ ID NO: 3285 - protein, 29 aa, synthetic construct
  REGION 1..29: note = source = /note="Description of Artificial Sequence: Synthetic peptide"
HGIGTFTSDVSSYLEGQAAKEFIAWLVKG

SEQ ID NO: 3286 - protein, 29 aa, synthetic construct
  REGION 1..29: note = source = /note="Description of Artificial Sequence: Synthetic peptide"
HGWGTFTSDVSSYLEGQAAKEFIAWLVKG

SEQ ID NO: 3287 - protein, 29 aa, synthetic construct
  REGION 1..29: note = source = /note="Description of Artificial Sequence: Synthetic peptide"
HGPGTFTSDVSSYLEGQAAKEFIAWLVKG

SEQ ID NO: 3288 - protein, 29 aa, synthetic construct
  REGION 1..29: note = source = /note="Description of Artificial Sequence: Synthetic peptide"
HGSGTFTSDVSSYLEGQAAKEFIAWLVKG

SEQ ID NO: 3289 - protein, 29 aa, synthetic construct
  REGION 1..29: note = source = /note="Description of Artificial Sequence: Synthetic peptide"
HGRGTFTSDVSSYLEGQAAKEFIAWLVKG

SEQ ID NO: 3290 - protein, 30 aa, synthetic construct
  REGION 1..30: note = source = /note="Description of Artificial Sequence: Synthetic polypeptide"
AHGEGTFTSDVSSYLEGQAAKEFIAWLVKG

SEQ ID NO: 3291 - protein, 30 aa, synthetic construct
  REGION 1..30: note = source = /note="Description of Artificial Sequence: Synthetic polypeptide"
GHGEGTFTSDVSSYLEGQAAKEFIAWLVKG

SEQ ID NO: 3292 - protein, 30 aa, synthetic construct
  REGION 1..30: note = source = /note="Description of Artificial Sequence: Synthetic polypeptide"
HHGEGTFTSDVSSYLEGQAAKEFIAWLVKG

SEQ ID NO: 3293 - protein, 29 aa, synthetic construct
  REGION 1..29: note = source = /note="Description of Artificial Sequence: Synthetic peptide"
HHEGTFTSDVSSYLEGQAAKEFIAWLVKG

SEQ ID NO: 3294 - protein, 29 aa, synthetic construct
  REGION 1..29: note = source = /note="Description of Artificial Sequence: Synthetic peptide"
HGEATFTSDVSSYLEGQAAKEFIAWLVKG

SEQ ID NO: 3295 - protein, 29 aa, synthetic construct
  REGION 1..29: note = source = /note="Description of Artificial Sequence: Synthetic peptide"
HGESTFTSDVSSYLEGQAAKEFIAWLVKG

SEQ ID NO: 3296 - protein, 29 aa, synthetic construct
  REGION 1..29: note = source = /note="Description of Artificial Sequence: Synthetic peptide"
HGEVTFTSDVSSYLEGQAAKEFIAWLVKG

SEQ ID NO: 3297 - protein, 29 aa, synthetic construct
  REGION 1..29: note = source = /note="Description of Artificial Sequence: Synthetic peptide"
HGEKTFTSDVSSYLEGQAAKEFIAWLVKG

SEQ ID NO: 3298 - protein, 29 aa, synthetic construct
  REGION 1..29: note = source = /note="Description of Artificial Sequence: Synthetic peptide"
HGEETFTSDVSSYLEGQAAKEFIAWLVKG

SEQ ID NO: 3299 - protein, 29 aa, synthetic construct
  REGION 1..29: note = source = /note="Description of Artificial Sequence: Synthetic peptide"
HGEGTFTSDVSSYLEGQAAKEFIAWLVKG

SEQ ID NO: 3300 - protein, 31 aa, synthetic construct
  REGION 1..31: note = source = /note="Description of Artificial Sequence: Synthetic polypeptide"
HVEGTFTSDVSSYLEGQAAKEFIAWLVKGRG

SEQ ID NO: 3301 - protein, 31 aa, synthetic construct
  REGION 1..31: note = source = /note="Description of Artificial Sequence: Synthetic polypeptide"
HSEGTFTSDVSSYLEGQAAKEFIAWLVKGRG

SEQ ID NO: 3302 - protein, 31 aa, synthetic construct
  REGION 1..31: note = source = /note="Description of Artificial Sequence: Synthetic polypeptide"
HGQGTFTSDVSSYLEGQAAKEFIAWLVKGRG

SEQ ID NO: 3303 - protein, 8 aa, synthetic construct
  REGION 1..8: note = source = /note="Description of Artificial Sequence: Synthetic peptide"
GGGSGGGS

SEQ ID NO: 3304 - protein, 10 aa, synthetic construct
  REGION 1..10: note = source = /note="Description of Artificial Sequence: Synthetic peptide"
GGGGSGGGGS

SEQ ID NO: 3305 - protein, 12 aa, synthetic construct
  REGION 1..12: note = source = /note="Description of Artificial Sequence: Synthetic peptide"
GGGSGGGSGGGS

SEQ ID NO: 3306 - protein, 15 aa, synthetic construct
  REGION 1..15: note = source = /note="Description of Artificial Sequence: Synthetic peptide"
GGGGSGGGGSGGGGS

SEQ ID NO: 3307 - protein, 16 aa, synthetic construct
  REGION 1..16: note = source = /note="Description of Artificial Sequence: Synthetic peptide"
GGGSGGGSGGGSGGGS

SEQ ID NO: 3308 - protein, 20 aa, synthetic construct
  REGION 1..20: note = source = /note="Description of Artificial Sequence: Synthetic peptide"
GGGGSGGGGSGGGGSGGGGS

SEQ ID NO: 3309 - protein, 20 aa, synthetic construct
  REGION 1..20: note = source = /note="Description of Artificial Sequence: Synthetic peptide"
GGGSGGGSGGGSGGGSGGGS

SEQ ID NO: 3310 - protein, 25 aa, synthetic construct
  REGION 1..25: note = source = /note="Description of Artificial Sequence: Synthetic peptide"
GGGGSGGGGSGGGGSGGGGSGGGGS

SEQ ID NO: 3311 - protein, 24 aa, synthetic construct
  REGION 1..24: note = source = /note="Description of Artificial Sequence: Synthetic peptide"
GGGSGGGSGGGSGGGSGGGSGGGS

SEQ ID NO: 3312 - protein, 6 aa, synthetic construct
  REGION 1..6: note = source = /note="Description of Artificial Sequence: Synthetic peptide"
GGEGGG

SEQ ID NO: 3313 - protein, 8 aa, synthetic construct
  REGION 1..8: note = source = /note="Description of Artificial Sequence: Synthetic peptide"
GGEEEGGG

SEQ ID NO: 3314 - protein, 5 aa, synthetic construct
  REGION 1..5: note = source = /note="Description of Artificial Sequence: Synthetic peptide"
GEEEG

SEQ ID NO: 3315 - protein, 4 aa, synthetic construct
  REGION 1..4: note = source = /note="Description of Artificial Sequence: Synthetic peptide"
GEEE

SEQ ID NO: 3316 - protein, 6 aa, synthetic construct
  REGION 1..6: note = source = /note="Description of Artificial Sequence: Synthetic peptide"
GGDGGG

SEQ ID NO: 3317 - protein, 7 aa, synthetic construct
  REGION 1..7: note = source = /note="Description of Artificial Sequence: Synthetic peptide"
GGDDDGG

SEQ ID NO: 3318 - protein, 5 aa, synthetic construct
  REGION 1..5: note = source = /note="Description of Artificial Sequence: Synthetic peptide"
GDDDG

SEQ ID NO: 3319 - protein, 4 aa, synthetic construct
  REGION 1..4: note = source = /note="Description of Artificial Sequence: Synthetic peptide"
GDDD

SEQ ID NO: 3320 - protein, 21 aa, synthetic construct
  REGION 1..21: note = source = /note="Description of Artificial Sequence: Synthetic peptide"
GGGGSDDSDEGSDGEDGGGGS

SEQ ID NO: 3321 - protein, 5 aa, synthetic construct
  REGION 1..5: note = source = /note="Description of Artificial Sequence: Synthetic peptide"
WEWEW

SEQ ID NO: 3322 - protein, 5 aa, synthetic construct
  REGION 1..5: note = source = /note="Description of Artificial Sequence: Synthetic peptide"
FEFEF

SEQ ID NO: 3323 - protein, 6 aa, synthetic construct
  REGION 1..6: note = source = /note="Description of Artificial Sequence: Synthetic peptide"
EEEWWW

SEQ ID NO: 3324 - protein, 6 aa, synthetic construct
  REGION 1..6: note = source = /note="Description of Artificial Sequence: Synthetic peptide"
EEEFFF

SEQ ID NO: 3325 - protein, 7 aa, synthetic construct
  REGION 1..7: note = source = /note="Description of Artificial Sequence: Synthetic peptide"
WWEEEWW

SEQ ID NO: 3326 - protein, 7 aa, synthetic construct
  REGION 1..7: note = source = /note="Description of Artificial Sequence: Synthetic peptide"
FFEEEFF

SEQ ID NO: 3327 - protein, 4 aa, synthetic construct
  REGION 1..4: note = source = /note="Description of Artificial Sequence: Synthetic peptide"
GGGG

SEQ ID NO: 3328 - protein, 9 aa, synthetic construct
  REGION 1..9: note = source = /note="Description of Artificial Sequence: Synthetic peptide"
GGGGSGGGG

SEQ ID NO: 3329 - protein, 10 aa, synthetic construct
  REGION 1..10: note = source = /note="Description of Artificial Sequence: Synthetic peptide"
GAPAPAPAPG

SEQ ID NO: 3330 - protein, 14 aa, synthetic construct
  REGION 1..14: note = source = /note="Description of Artificial Sequence: Synthetic peptide"
GGGGAGGGGAGGGG

SEQ ID NO: 3331 - protein, 14 aa, synthetic construct
  REGION 1..14: note = source = /note="Description of Artificial Sequence: Synthetic peptide"
GAPAPAPAPAPAPG

SEQ ID NO: 3332 - protein, 18 aa, synthetic construct
  REGION 1..18: note = source = /note="Description of Artificial Sequence: Synthetic peptide"
GAPAPAPAPAPAPAPAPG

SEQ ID NO: 3333 - protein, 19 aa, synthetic construct
  REGION 1..19: note = source = /note="Description of Artificial Sequence: Synthetic peptide"
GGGGAGGGGAGGGGAGGGG

SEQ ID NO: 3334 - protein, 22 aa, synthetic construct
  REGION 1..22: note = source = /note="Description of Artificial Sequence: Synthetic peptide"
GAPAPAPAPAPAPAPAPAPAPG

SEQ ID NO: 3335 - protein, 23 aa, synthetic construct
  REGION 1..23: note = source = /note="Description of Artificial Sequence: Synthetic peptide"
GSGSATGGSGSVASSGSGSATGS

SEQ ID NO: 3336 - protein, 23 aa, synthetic construct
  REGION 1..23: note = source = /note="Description of Artificial Sequence: Synthetic peptide"
GSGSATGGSGSVASSGSGSATHL

SEQ ID NO: 3337 - skipped

SEQ ID NO: 3338 - protein, 5 aa, synthetic construct
  REGION 1..5: note = source = /note="Description of Artificial Sequence: Synthetic peptide"
GGGGG

SEQ ID NO: 3339 - protein, 7 aa, synthetic construct
  REGION 1..7: note = source = /note="Description of Artificial Sequence: Synthetic peptide"
GGGGGGG

SEQ ID NO: 3340 - protein, 15 aa, synthetic construct
  REGION 1..15: note = source = /note="Description of Artificial Sequence: Synthetic peptide"
GGGGSGGGGSGGGGS

SEQ ID NO: 3341 - protein, 6 aa, synthetic construct
  REGION 1..6: note = source = /note="Description of Artificial Sequence: Synthetic peptide"
GGGGGK

SEQ ID NO: 3342 - protein, 7 aa, synthetic construct
  REGION 1..7: note = source = /note="Description of Artificial Sequence: Synthetic peptide"
GGGGGKR

SEQ ID NO: 3343 - protein, 8 aa, synthetic construct
  REGION 1..8: note = source = /note="Description of Artificial Sequence: Synthetic peptide"
GGGKGGGG

SEQ ID NO: 3344 - protein, 8 aa, synthetic construct
  REGION 1..8: note = source = /note="Description of Artificial Sequence: Synthetic peptide"
GGGNGSGG

SEQ ID NO: 3345 - protein, 8 aa, synthetic construct
  REGION 1..8: note = source = /note="Description of Artificial Sequence: Synthetic peptide"
GGGCGGGG

SEQ ID NO: 3346 - protein, 8 aa, synthetic construct
  REGION 1..8: note = source = /note="Description of Artificial Sequence: Synthetic peptide"
GGGKGGGG

SEQ ID NO: 3347 - protein, 5 aa, synthetic construct
  REGION 1..5: note = source = /note="Description of Artificial Sequence: Synthetic peptide"
GGGGS

SEQ ID NO: 3348 - protein, 10 aa, synthetic construct
  REGION 1..10: note = source = /note="Description of Artificial Sequence: Synthetic peptide"
GGGGSGGGGS

SEQ ID NO: 3349 - protein, 20 aa, synthetic construct
  REGION 1..20: note = source = /note="Description of Artificial Sequence: Synthetic peptide"
GGGGSGGGGSGGGGSGGGGS

SEQ ID NO: 3350 - protein, 25 aa, synthetic construct
  REGION 1..25: note = source = /note="Description of Artificial Sequence: Synthetic peptide"
GGGGSGGGGSGGGGSGGGGSGGGGS

SEQ ID NO: 3351-3353 - skipped (3 entries)

SEQ ID NO: 3354 - protein, 22 aa, synthetic construct
  REGION 1..22: note = source = /note="Description of Artificial Sequence: Synthetic peptide"
HGSGSATGGSGSTASSGSGSAT

SEQ ID NO: 3355 - protein, 19 aa, synthetic construct
  REGION 1..19: note = source = /note="Description of Artificial Sequence: Synthetic peptide"
AEAAAKEAAAKEAAAKAGG

SEQ ID NO: 3356 - protein, 22 aa, synthetic construct
  REGION 1..22: note = source = /note="Description of Artificial Sequence: Synthetic peptide"
GSGSATGGSGSTASSGSGSATH

SEQ ID NO: 3357 - protein, 5 aa, synthetic construct
  REGION 1..5: note = source = /note="Description of Artificial Sequence: Synthetic peptide"
GPNGG

SEQ ID NO: 3358 - protein, 6 aa, synthetic construct
  REGION 1..6: note = source = /note="Description of Artificial Sequence: Synthetic 6xHis tag"
HHHHHH

SEQ ID NO: 3359 - protein, 30 aa, synthetic construct
  REGION 1..30: note = source = /note="Description of Artificial Sequence: Synthetic polypeptide"
GGGGSGGGGSGGGGSGGGGSGGGGSGGGGS

SEQ ID NO: 3360 - protein, 8 aa, synthetic construct
  SITE 1..8: note = /note="This sequence may encompass 1-8 residues"
  REGION 1..8: note = source = /note="Description of Artificial Sequence: Synthetic peptide"
GGGGGGGG

SEQ ID NO: 3361 - protein, 5 aa, synthetic construct
  REGION 1..5: note = source = /note="Description of Artificial Sequence: Synthetic peptide"
GGGGS

SEQ ID NO: 3362 - protein, 8 aa, synthetic construct
  SITE 1..8: note = /note="This sequence may encompass 2-4 'Gly Ala' repeating units"
  REGION 1..8: note = source = /note="Description of Artificial Sequence: Synthetic peptide"
GAGAGAGA

SEQ ID NO: 3363 - protein, 8 aa, synthetic construct
  SITE 1..8: note = /note="This sequence may encompass 1-8 residues"
  REGION 1..8: note = source = /note="Description of Artificial Sequence: Synthetic peptide"
AAAAAAAA

SEQ ID NO: 3364 - protein, 5 aa, Homo sapiens
AWLVK

SEQ ID NO: 3365 - protein, 5 aa, synthetic construct
  REGION 1..5: note = source = /note="Description of Artificial Sequence: Synthetic peptide"
GGGGA

SEQ ID NO: 3366 - protein, 214 aa, synthetic construct
  REGION 1..214: note = source = /note="Description of Artificial Sequence: Synthetic polypeptide"
DIQMTQSPSSLSASIGDRVTITCRASQDLRNYLGWYHQKPGKAPKRLIYGASSLQSGVPSRFSGSGSGTCFTLTISSLQPEDFATYYCLQHNNYPFTFGPGTKVDIKRTVAAPSVFIFPPSDEQLKSGTASVVCLLNNFYPREAKVQWKVDNALQSGNSQESVTEQDSKDSTYSLSSTLTLSKADYEKHKVYACEVTHQGLSSPVTKSFNRGEC

SEQ ID NO: 3367 - protein, 214 aa, synthetic construct; identical to SEQ ID NO: 342
  REGION 1..214: note = source = /note="Description of Artificial Sequence: Synthetic polypeptide"

SEQ ID NO: 3368 - protein, 214 aa, synthetic construct; identical to SEQ ID NO: 342
  REGION 1..214: note = source = /note="Description of Artificial Sequence: Synthetic polypeptide"

SEQ ID NO: 3369 - protein, 214 aa, synthetic construct
  REGION 1..214: note = source = /note="Description of Artificial Sequence: Synthetic polypeptide"
DIQLTQSPSSLSASVGDRVTITCRASQTISRFLNWYQQKPGKAPELLIYVASSLQSGVPSRFSGSGSGTCFTLTISSLQPEDFATYYCQQSYSTLISFGQGTKLEITRTVAAPSVFIFPPSDEQLKSGTASVVCLLNNFYPREAKVQWKVDNALQSGNSQESVTEQDSKDSTYSLSSTLTLSKADYEKHKVYACEVTHQGLSSPVTKSFNRGEC

SEQ ID NO: 3370 - protein, 214 aa, synthetic construct
  REGION 1..214: note = source = /note="Description of Artificial Sequence: Synthetic polypeptide"
EIQLTQSPSSLSASVGDRVTITCRASQTISRFLNWYQQKPGKAPELLIYVASSLQSGVPSRFSGSGSGTDFTLTISSLQPEDFATYYCQQSYSTLISFGQGTKLEITRTVAAPSVFIFPPSDEQLKSGTASVVCLLNNFYPREAKVQWKVDNALQSGNSQESVTEQDSKDSTYSLSSTLTLSKADYEKHKVYACEVTHQGLSSPVTKSFNRGEC

SEQ ID NO: 3371 - protein, 214 aa, synthetic construct; identical to SEQ ID NO: 455
  REGION 1..214: note = source = /note="Description of Artificial Sequence: Synthetic polypeptide"

SEQ ID NO: 3372 - protein, 214 aa, synthetic construct; identical to SEQ ID NO: 455
  REGION 1..214: note = source = /note="Description of Artificial Sequence: Synthetic polypeptide"

SEQ ID NO: 3373 - protein, 214 aa, synthetic construct
  REGION 1..214: note = source = /note="Description of Artificial Sequence: Synthetic polypeptide"
EIQMTQSPSSLSASIGDRVTITCRASQDLRNYLGWYHQKPGKAPKRLIYGASSLQSGVPSRFSGSGSGTEFTLTISSLQPEDFATYYCLQHNNYPFTFGPGTKVDIKRTVAAPSVFIFPPSDEQLKSGTASVVCLLNNFYPREAKVQWKVDNALQSGNSQESVTEQDSKDSTYSLSSTLTLSKADYEKHKVYACEVTHQGLSSPVTKSFNRGEC

SEQ ID NO: 3374 - protein, 268 aa, synthetic construct
  REGION 1..268: note = source = /note="Description of Artificial Sequence: Synthetic polypeptide"
HGEGTFTSDVSSYLEGQAAKEFIAWLVKGGGGSGSATGGSGSVASSGSGSATHLDIQMTQSPSSLSASIGDRVTITCRASQDIRDYLGWYQQKPGKAPKRLIYGASSLQSGVPSRFSGSGSGTEFTLTISSLQPEDFATYYCLQHNNYPFTFGPGTKVDIKRTVAAPSVFIFPPSDEQLKSGTASVVCLLNNFYPREAKVQWKVDNALQSGNSQESVTEQDSKDSTYSLSSTLTLSKADYEKHKVYACEVTHQGLSSPVTKSFNRGEC

SEQ ID NO: 3375 - protein, 505 aa, synthetic construct
  REGION 1..505: note = source = /note="Description of Artificial Sequence: Synthetic polypeptide"
HGEGTFTSDVSSYLEGQAAKEFIAWLVKGGGGSGSATGGSGSVASSGSGSATHLQVQLVESGGGVVQPGRSLRLSCAASGFTFSYFGMHWVRQAPGKGLEWVAVIWYDGSNKYYADSVKGRFTISRDNSKNTLYLQMNSLRAEDTAVYYCARDGTIFGVLLGDYWGQGTLVTVSSASTKGPSVFPLAPSSKSTSGGTAALGCLVKDYFPEPVTVSWNSGALTSGVHTFPAVLQSSGLYSLSSVVTVPSSSLGTQTYICNVNHKPSNTKVDKKVEPKSCDKTHTCPPCPAPELLGGPSVFLFPPKPKDTLMISRTPEVTCVVVDVSHEDPEVKFNWYVDGVEVHNAKTKPCEEQYGSTYRCVSVLTVLHQDWLNGKEYKCKVSNKALPAPIEKTISKAKGQPREPQVYTLPPSREEMTKNQVSLTCLVKGFYPSDIAVEWESNGQPENNYKTTPPVLDSDGSFFLYSKLTVDKSRWQQGNVFSCSVMHEALHNHYTQKSLSLSPGK

SEQ ID NO: 3376 - protein, 268 aa, synthetic construct
  REGION 1..268: note = source = /note="Description of Artificial Sequence: Synthetic polypeptide"
HGEGTFTSDVSSYLEGQAAKEFIAWLVKGGGGSGSATGGSGSVASSGSGSATHLDIQLTQSPSSLSASVGDRVTITCRASQTISRFLNWYQQKPGKAPELLIYVASSLQSGVPSRFSGSGSGTDFTLTISSLQPEDFATYYCQQSYSTLISFGQGTKLEITRTVAAPSVFIFPPSDEQLKSGTASVVCLLNNFYPREAKVQWKVDNALQSGNSQESVTEQDSKDSTYSLSSTLTLSKADYEKHKVYACEVTHQGLSSPVTKSFNRGEC

SEQ ID NO: 3377 - protein, 505 aa, synthetic construct
  REGION 1..505: note = source = /note="Description of Artificial Sequence: Synthetic polypeptide"
HGEGTFTSDVSSYLEGQAAKEFIAWLVKGGGGSGSATGGSGSVASSGSGSATHLQVQLVESGGGVVQPGRSLRLSCTASGFTFSSYGIHWVRQAPGKGLEWVAVIWYDGSNKFHADSVKGRFTISRDNSKNTLYLQMNSLRAEDSAMYFCARGKVAGMPEAFEIWGQGTKVTVSSASTKGPSVFPLAPSSKSTSGGTAALGCLVKDYFPEPVTVSWNSGALTSGVHTFPAVLQSSGLYSLSSVVTVPSSSLGTQTYICNVNHKPSNTKVDKKVEPKSCDKTHTCPPCPAPELLGGPSVFLFPPKPKDTLMISRTPEVTCVVVDVSHEDPEVKFNWYVDGVEVHNAKTKPCEEQYGSTYRCVSVLTVLHQDWLNGKEYKCKVSNKALPAPIEKTISKAKGQPREPQVYTLPPSREEMTKNQVSLTCLVKGFYPSDIAVEWESNGQPENNYKTTPPVLDSDGSFFLYSKLTVDKSRWQQGNVFSCSVMHEALHNHYTQKSLSLSPGK

SEQ ID NO: 3378 - protein, 268 aa, synthetic construct
  REGION 1..268: note = source = /note="Description of Artificial Sequence: Synthetic polypeptide"
HGEGTFTSDVSSYLEGQAAKEFIAWLVKGGGGSGSATGGSGSVASSGSGSATHLDIQMTQSPSSLSASIGDRVTITCRASQDLRNYLGWYHQKPGKAPKRLIYGASSLQSGVPSRFSGSGSGTEFTLTISSLQPEDFATYYCLQHNNYPFTFGPGTKVDIKRTVAAPSVFIFPPSDEQLKSGTASVVCLLNNFYPREAKVQWKVDNALQSGNSQESVTEQDSKDSTYSLSSTLTLSKADYEKHKVYACEVTHQGLSSPVTKSFNRGEC

SEQ ID NO: 3379 - protein, 505 aa, synthetic construct
  REGION 1..505: note = source = /note="Description of Artificial Sequence: Synthetic polypeptide"
HGEGTFTSDVSSYLEGQAAKEFIAWLVKGGGGSGSATGGSGSVASSGSGSATHLQVQLVESGGGVVQPGRSLRLSCAASGFTFSNFGMHWVRQAPGKGLEWVAVIWYDGSNENYADSVKGRFTISRDNSKNTLYLHMNSLRAADTAVYYCARDGTIFGVVLGDYWGQGTLVTVSSASTKGPSVFPLAPSSKSTSGGTAALGCLVKDYFPEPVTVSWNSGALTSGVHTFPAVLQSSGLYSLSSVVTVPSSSLGTQTYICNVNHKPSNTKVDKKVEPKSCDKTHTCPPCPAPELLGGPSVFLFPPKPKDTLMISRTPEVTCVVVDVSHEDPEVKFNWYVDGVEVHNAKTKPCEEQYGSTYRCVSVLTVLHQDWLNGKEYKCKVSNKALPAPIEKTISKAKGQPREPQVYTLPPSREEMTKNQVSLTCLVKGFYPSDIAVEWESNGQPENNYKTTPPVLDSDGSFFLYSKLTVDKSRWQQGNVFSCSVMHEALHNHYTQKSLSLSPGK

SEQ ID NO: 3380 - protein, 448 aa, synthetic construct
  REGION 1..448: note = source = /note="Description of Artificial Sequence: Synthetic polypeptide"
QVQLVESGGGVVQPGRSLRLSCAASGFTFSSYGMHWVRQAPGKGLEWVAVIWYDGSNKYYADSVKGRFTISRDNSKNTLYLQMNSLRAEDTAVYYCARYNFNYGMDVWGQGTTVTVSSASTKGPSVFPLAPSSKSTSGGTAALGCLVKDYFPEPVTVSWNSGALTSGVHTFPAVLQSSGLYSLSSVVTVPSSSLGTQTYICNVNHKPSNTKVDKKVEPKSCDKTHTCPPCPAPELLGGPSVFLFPPKPKDTLMISRTPEVTCVVVDVSHEDPCVKFNWYVDGVEVHNAKTKPCEEQYGSTYRCVSVLTVLHQDWLNGKEYKCKVSNKALPAPIEKTISKAKGQPREPQVYTLPPSREEMTKNQVSLTCLVKGFYPSDIAVEWESNGQPENNYKTTPPVLDSDGSFFLYSKLTVDKSRWQQGNVFSCSVMHEALHNHYTQKSLSLSPGK

SEQ ID NO: 3381 - protein, 268 aa, synthetic construct
  REGION 1..268: note = source = /note="Description of Artificial Sequence: Synthetic polypeptide"
HGEGTFTSDLSKQMEEEAVRLAAQAAQQGGGGSGSATGGSGSVASSGSGSATGSAIQMTQSPSSVSASIGDRVTITCRASQNINNLLAWYQQKPGKAPKLLIYTASSLQSEVPSRFSGSGSGTDFTLTISSLQPEDFAIYCCQQAHRFPPTFGQGTKVEIRRTVAAPSVFIFPPSDEQLKSGTASVVCLLNNFYPREAKVQWKVDNALQSGNSQESVTEQDSKDSTYSLSSTLTLSKADYEKHKVYACEVTHQGLSSPVTKSFNRGEC

SEQ ID NO: 3382 - protein, 269 aa, synthetic construct
  REGION 1..269: note = source = /note="Description of Artificial Sequence: Synthetic polypeptide"
HGEGTFTSDLSKQMEEEAVRLFAAQAAQQGGGGSGSATGGSGSVASSGSGSATGSAIQMTQSPSSVSASIGDRVTITCRASQNINNLLAWYQQKPGKAPKLLIYTASSLQSEVPSRFSGSGSGTDFTLTISSLQPEDFAIYCCQQAHRFPPTFGQGTKVEIRRTVAAPSVFIFPPSDEQLKSGTASVVCLLNNFYPREAKVQWKVDNALQSGNSQESVTEQDSKDSTYSLSSTLTLSKADYEKHKVYACEVTHQGLSSPVTKSFNRGEC

SEQ ID NO: 3383 - protein, 259 aa, synthetic construct
  REGION 1..259: note = source = /note="Description of Artificial Sequence: Synthetic polypeptide"
HGEGTFTSDLSKQMEEEAVRLFGSGSATGGSGSVASSGSGSATGSAIQMTQSPSSVSASIGDRVTITCRASQNINNLLAWYQQKPGKAPKLLIYTASSLQSEVPSRFSGSGSGTDFTLTISSLQPEDFAIYCCQQAHRFPPTFGQGTKVEIRRTVAAPSVFIFPPSDEQLKSGTASVVCLLNNFYPREAKVQWKVDNALQSGNSQESVTEQDSKDSTYSLSSTLTLSKADYEKHKVYACEVTHQGLSSPVTKSFNRGEC

SEQ ID NO: 3384 - protein, 260 aa, synthetic construct
  REGION 1..260: note = source = /note="Description of Artificial Sequence: Synthetic polypeptide"
HGEGTFTSDLSKQMEEEAVRLFIGSGSATGGSGSVASSGSGSATGSAIQMTQSPSSVSASIGDRVTITCRASQNINNLLAWYQQKPGKAPKLLIYTASSLQSEVPSRFSGSGSGTDFTLTISSLQPEDFAIYCCQQAHRFPPTFGQGTKVEIRRTVAAPSVFIFPPSDEQLKSGTASVVCLLNNFYPREAKVQWKVDNALQSGNSQESVTEQDSKDSTYSLSSTLTLSKADYEKHKVYACEVTHQGLSSPVTKSFNRGEC

SEQ ID NO: 3385 - protein, 445 aa, synthetic construct
  REGION 1..445: note = source = /note="Description of Artificial Sequence: Synthetic polypeptide"
QVTLKESGPGILQPSQTLSLTCSFSGFSLSTFGMGVGWIRQPPGKGLEWLAHIWWDDDKYYNPALKSRLTISKDTSKNQVFLKIANVDTADTATYYCARKGNFAWFTYWGQGTLVTVSAASTKGPSVFPLAPCSRSTSESTAALGCLVKDYFPEPVTVSWNSGALTSGVHTFPAVLQSSGLYSLSSVVTVPSSNFGTQTYTCNVDHKPSNTKVDKTVERKCCVECPPCPAPPVAGPSVFLFPPKPKDTLMISRTPEVTCVVVDVSHEDPEVQFNWYVDGVEVHNAKTKPREEQFNSTFRVVSVLTVVHQDWLNGKEYKCKVSNKGLPAPIEKTISKTKGQPREPQVYTLPPSREEMTKNQVSLTCLVKGFYPSDIAVEWESNGQPENNYKTTPPMLDSDGSFFLYSKLTVDKSRWQQGNVFSCSVMHEALHNHYTQKSLSLSPGK

SEQ ID NO: 3386 - protein, 214 aa, synthetic construct
  REGION 1..214: note = source = /note="Description of Artificial Sequence: Synthetic polypeptide"
DIQMTQSPSSLSASIGDRVTITCRASQDIRDYLGWYQQKPGKAPKRLIYGASSLQSGVPSRFSGSGSGTCFTLTISSLQPEDFATYYCLQHNNYPFTFGPGTKVDIKRTVAAPSVFIFPPSDEQLKSGTASVVCLLNNFYPREAKVQWKVDNALQSGNSQESVTEQDSKDSTYSLSSTLTLSKADYEKHKVYACEVTHQGLSSPVTKSFNRGEC

SEQ ID NO: 3387 - protein, 214 aa, synthetic construct; identical to SEQ ID NO: 316
  REGION 1..214: note = source = /note="Description of Artificial Sequence: Synthetic polypeptide"

SEQ ID NO: 3388 - protein, 214 aa, synthetic construct; identical to SEQ ID NO: 316
  REGION 1..214: note = source = /note="Description of Artificial Sequence: Synthetic polypeptide"

SEQ ID NO: 3389 - protein, 507 aa, synthetic construct
  REGION 1..507: note = source = /note="Description of Artificial Sequence: Synthetic polypeptide"
HGEGTFTSDVSSYLEGQAAKEFIAWLVKGGGGSGSATGGSGSVASSGSGSATHLQVQLQESGPGLVKPSETLSLTCTVSGGSISSYYWSWIRQPPGKGLEWIGYIYYSGNTNSNPSLKSRVTISVDTSKNQFSLKLSSVTAADTAVYYCARTYYDSSGYYYRAFDIWGQGTMVTVSSASTKGPSVFPLAPSSKSTSGGTAALGCLVKDYFPEPVTVSWNSGALTSGVHTFPAVLQSSGLYSLSSVVTVPSSSLGTQTYICNVNHKPSNTKVDKKVEPKSCDKTHTCPPCPAPELLGGPSVFLFPPKPKDTLMISRTPEVTCVVVDVSHEDPEVKFNWYVDGVEVHNAKTKPCEEQYGSTYRCVSVLTVLHQDWLNGKEYKCKVSNKALPAPIEKTISKAKGQPREPQVYTLPPSREEMTKNQVSLTCLVKGFYPSDIAVEWESNGQPENNYKTTPPVLDSDGSFFLYSKLTVDKSRWQQGNVFSCSVMHEALHNHYTQKSLSLSPGK

SEQ ID NO: 3390 - protein, 507 aa, synthetic construct
  REGION 1..507: note = source = /note="Description of Artificial Sequence: Synthetic polypeptide"
HGEGTFTSDVSSYLEEQAAKEFIAWLVKGGGGSGSATGGSGSVASSGSGSATHLQVQLQESGPGLVKPSETLSLTCTVSGGSISSYYWSWIRQPPGKGLEWIGYIYYSGNTNSNPSLKSRVTISVDTSKNQFSLKLSSVTAADTAVYYCARTYYDSSGYYYRAFDIWGQGTMVTVSSASTKGPSVFPLAPSSKSTSGGTAALGCLVKDYFPEPVTVSWNSGALTSGVHTFPAVLQSSGLYSLSSVVTVPSSSLGTQTYICNVNHKPSNTKVDKKVEPKSCDKTHTCPPCPAPELLGGPSVFLFPPKPKDTLMISRTPEVTCVVVDVSHEDPEVKFNWYVDGVEVHNAKTKPCEEQYGSTYRCVSVLTVLHQDWLNGKEYKCKVSNKALPAPIEKTISKAKGQPREPQVYTLPPSREEMTKNQVSLTCLVKGFYPSDIAVEWESNGQPENNYKTTPPVLDSDGSFFLYSKLTVDKSRWQQGNVFSCSVMHEALHNHYTQKSLSLSPGK

SEQ ID NO: 3391 - protein, 506 aa, synthetic construct
  REGION 1..506: note = source = /note="Description of Artificial Sequence: Synthetic polypeptide"
HGEGTFTSDVSSYLEGQAAKEFIAWLVKGGGGSGSATGGSGSVASSGSGSATHLQVQLQESGPGLVKPSQTLSLTCTVSGGSISSGDYFWSWIRQLPGKGLEWIGHIHNSGTTYYNPSLKSRVTISVDTSKKQFSLRLSSVTAADTAVYYCARDRGGDYAYGMDVWGQGTTVTVSSASTKGPSVFPLAPSSKSTSGGTAALGCLVKDYFPEPVTVSWNSGALTSGVHTFPAVLQSSGLYSLSSVVTVPSSSLGTQTYICNVNHKPSNTKVDKKVEPKSCDKTHTCPPCPAPELLGGPSVFLFPPKPKDTLMISRTPEVTCVVVDVSHEDPEVKFNWYVDGVEVHNAKTKPCEEQYGSTYRCVSVLTVLHQDWLNGKEYKCKVSNKALPAPIEKTISKAKGQPREPQVYTLPPSREEMTKNQVSLTCLVKGFYPSDIAVEWESNGQPENNYKTTPPVLDSDGSFFLYSKLTVDKSRWQQGNVFSCSVMHEALHNHYTQKSLSLSPGK

SEQ ID NO: 3392 - protein, 506 aa, synthetic construct
  REGION 1..506: note = source = /note="Description of Artificial Sequence: Synthetic polypeptide"
HGEGTFTSDVSSYLEEQAAKEFIAWLVKGGGGSGSATGGSGSVASSGSGSATHLQVQLQESGPGLVKPSQTLSLTCTVSGGSISSGDYFWSWIRQLPGKGLEWIGHIHNSGTTYYNPSLKSRVTISVDTSKKQFSLRLSSVTAADTAVYYCARDRGGDYAYGMDVWGQGTTVTVSSASTKGPSVFPLAPSSKSTSGGTAALGCLVKDYFPEPVTVSWNSGALTSGVHTFPAVLQSSGLYSLSSVVTVPSSSLGTQTYICNVNHKPSNTKVDKKVEPKSCDKTHTCPPCPAPELLGGPSVFLFPPKPKDTLMISRTPEVTCVVVDVSHEDPEVKFNWYVDGVEVHNAKTKPCEEQYGSTYRCVSVLTVLHQDWLNGKEYKCKVSNKALPAPIEKTISKAKGQPREPQVYTLPPSREEMTKNQVSLTCLVKGFYPSDIAVEWESNGQPENNYKTTPPVLDSDGSFFLYSKLTVDKSRWQQGNVFSCSVMHEALHNHYTQKSLSLSPGK

SEQ ID NO: 3393 - protein, 505 aa, synthetic construct
  REGION 1..505: note = source = /note="Description of Artificial Sequence: Synthetic polypeptide"
HGEGTFTSDVSSYLEEQAAKEFIAWLVKGGGGSGSATGGSGSVASSGSGSATHLQVQLVESGGGVVQPGRSLRLSCAASGFTFSYFGMHWVRQAPGKGLEWVAVIWYDGSNKYYADSVKGRFTISRDNSKNTLYLQMNSLRAEDTAVYYCARDGTIFGVLLGDYWGQGTLVTVSSASTKGPSVFPLAPSSKSTSGGTAALGCLVKDYFPEPVTVSWNSGALTSGVHTFPAVLQSSGLYSLSSVVTVPSSSLGTQTYICNVNHKPSNTKVDKKVEPKSCDKTHTCPPCPAPELLGGPSVFLFPPKPKDTLMISRTPEVTCVVVDVSHEDPEVKFNWYVDGVEVHNAKTKPCEEQYGSTYRCVSVLTVLHQDWLNGKEYKCKVSNKALPAPIEKTISKAKGQPREPQVYTLPPSREEMTKNQVSLTCLVKGFYPSDIAVEWESNGQPENNYKTTPPVLDSDGSFFLYSKLTVDKSRWQQGNVFSCSVMHEALHNHYTQKSLSLSPGK

SEQ ID NO: 3394 - protein, 513 aa, synthetic construct
  REGION 1..513: note = source = /note="Description of Artificial Sequence: Synthetic polypeptide"
HGEGTFTSDLSKQMEEEAVRLFIEWLKNGGPSSGAPPPSGSGSATGGSGSVASSGSGSATHLQVQLVESGGGVVQPGRSLRLSCAASGFTFSYFGMHWVRQAPGKGLEWVAVIWYDGSNKYYADSVKGRFTISRDNSKNTLYLQMNSLRAEDTAVYYCARDGTIFGVLLGDYWGQGTLVTVSSASTKGPSVFPLAPSSKSTSGGTAALGCLVKDYFPEPVTVSWNSGALTSGVHTFPAVLQSSGLYSLSSVVTVPSSSLGTQTYICNVNHKPSNTKVDKKVEPKSCDKTHTCPPCPAPELLGGPSVFLFPPKPKDTLMISRTPEVTCVVVDVSHEDPEVKFNWYVDGVEVHNAKTKPCEEQYGSTYRCVSVLTVLHQDWLNGKEYKCKVSNKALPAPIEKTISKAKGQPREPQVYTLPPSREEMTKNQVSLTCLVKGFYPSDIAVEWESNGQPENNYKTTPPVLDSDGSFFLYSKLTVDKSRWQQGNVFSCSVMHEALHNHYTQKSLSLSPGK

SEQ ID NO: 3395 - protein, 513 aa, synthetic construct; identical to SEQ ID NO: 3394
  REGION 1..513: note = source = /note="Description of Artificial Sequence: Synthetic polypeptide"

SEQ ID NO: 3396 - protein, 486 aa, synthetic construct
  REGION 1..486: note = source = /note="Description of Artificial Sequence: Synthetic polypeptide"
HGEGTFTSDVSSYLEGQAAKEFIAWLVKGGGGGGGQVQLVESGGGVVQPGRSLRLSCAASGFTFSYFGMHWVRQAPGKGLEWVAVIWYDGSNKYYADSVKGRFTISRDNSKNTLYLQMNSLRAEDTAVYYCARDGTIFGVLLGDYWGQGTLVTVSSASTKGPSVFPLAPSSKSTSGGTAALGCLVKDYFPEPVTVSWNSGALTSGVHTFPAVLQSSGLYSLSSVVTVPSSSLGTQTYICNVNHKPSNTKVDKKVEPKSCDKTHTCPPCPAPELLGGPSVFLFPPKPKDTLMISRTPEVTCVVVDVSHEDPEVKFNWYVDGVEVHNAKTKPCEEQYGSTYRCVSVLTVLHQDWLNGKEYKCKVSNKALPAPIEKTISKAKGQPREPQVYTLPPSREEMTKNQVSLTCLVKGFYPSDIAVEWESNGQPENNYKTTPPVLDSDGSFFLYSKLTVDKSRWQQGNVFSCSVMHEALHNHYTQKSLSLSPGK

SEQ ID NO: 3397 - protein, 491 aa, synthetic construct
  REGION 1..491: note = source = /note="Description of Artificial Sequence: Synthetic polypeptide"
HGEGTFTSDVSSYLEGQAAKEFIAWLVKGGGGGGGSGGGGQVQLVESGGGVVQPGRSLRLSCAASGFTFSYFGMHWVRQAPGKGLEWVAVIWYDGSNKYYADSVKGRFTISRDNSKNTLYLQMNSLRAEDTAVYYCARDGTIFGVLLGDYWGQGTLVTVSSASTKGPSVFPLAPSSKSTSGGTAALGCLVKDYFPEPVTVSWNSGALTSGVHTFPAVLQSSGLYSLSSVVTVPSSSLGTQTYICNVNHKPSNTKVDKKVEPKSCDKTHTCPPCPAPELLGGPSVFLFPPKPKDTLMISRTPEVTCVVVDVSHEDPEVKFNWYVDGVEVHNAKTKPCEEQYGSTYRCVSVLTVLHQDWLNGKEYKCKVSNKALPAPIEKTISKAKGQPREPQVYTLPPSREEMTKNQVSLTCLVKGFYPSDIAVEWESNGQPENNYKTTPPVLDSDGSFFLYSKLTVDKSRWQQGNVFSCSVMHEALHNHYTQKSLSLSPGK

SEQ ID NO: 3398 - protein, 496 aa, synthetic construct
  REGION 1..496: note = source = /note="Description of Artificial Sequence: Synthetic polypeptide"
HGEGTFTSDVSSYLEGQAAKEFIAWLVKGGGGGGGAGGGGAGGGGQVQLVESGGGVVQPGRSLRLSCAASGFTFSYFGMHWVRQAPGKGLEWVAVIWYDGSNKYYADSVKGRFTISRDNSKNTLYLQMNSLRAEDTAVYYCARDGTIFGVLLGDYWGQGTLVTVSSASTKGPSVFPLAPSSKSTSGGTAALGCLVKDYFPEPVTVSWNSGALTSGVHTFPAVLQSSGLYSLSSVVTVPSSSLGTQTYICNVNHKPSNTKVDKKVEPKSCDKTHTCPPCPAPELLGGPSVFLFPPKPKDTLMISRTPEVTCVVVDVSHEDPEVKFNWYVDGVEVHNAKTKPCEEQYGSTYRCVSVLTVLHQDWLNGKEYKCKVSNKALPAPIEKTISKAKGQPREPQVYTLPPSREEMTKNQVSLTCLVKGFYPSDIAVEWESNGQPENNYKTTPPVLDSDGSFFLYSKLTVDKSRWQQGNVFSCSVMHEALHNHYTQKSLSLSPGK

SEQ ID NO: 3399 - protein, 501 aa, synthetic construct
  REGION 1..501: note = source = /note="Description of Artificial Sequence: Synthetic polypeptide"
HGEGTFTSDVSSYLEGQAAKEFIAWLVKGGGGGGGAGGGGAGGGGAGGGGQVQLVESGGGVVQPGRSLRLSCAASGFTFSYFGMHWVRQAPGKGLEWVAVIWYDGSNKYYADSVKGRFTISRDNSKNTLYLQMNSLRAEDTAVYYCARDGTIFGVLLGDYWGQGTLVTVSSASTKGPSVFPLAPSSKSTSGGTAALGCLVKDYFPEPVTVSWNSGALTSGVHTFPAVLQSSGLYSLSSVVTVPSSSLGTQTYICNVNHKPSNTKVDKKVEPKSCDKTHTCPPCPAPELLGGPSVFLFPPKPKDTLMISRTPEVTCVVVDVSHEDPEVKFNWYVDGVEVHNAKTKPCEEQYGSTYRCVSVLTVLHQDWLNGKEYKCKVSNKALPAPIEKTISKAKGQPREPQVYTLPPSREEMTKNQVSLTCLVKGFYPSDIAVEWESNGQPENNYKTTPPVLDSDGSFFLYSKLTVDKSRWQQGNVFSCSVMHEALHNHYTQKSLSLSPGK

SEQ ID NO: 3400 - protein, 492 aa, synthetic construct
  REGION 1..492: note = source = /note="Description of Artificial Sequence: Synthetic polypeptide"
HGEGTFTSDVSSYLEGQAAKEFIAWLVKGGGGAPAPAPAPGQVQLVESGGGVVQPGRSLRLSCAASGFTFSYFGMHWVRQAPGKGLEWVAVIWYDGSNKYYADSVKGRFTISRDNSKNTLYLQMNSLRAEDTAVYYCARDGTIFGVLLGDYWGQGTLVTVSSASTKGPSVFPLAPSSKSTSGGTAALGCLVKDYFPEPVTVSWNSGALTSGVHTFPAVLQSSGLYSLSSVVTVPSSSLGTQTYICNVNHKPSNTKVDKKVEPKSCDKTHTCPPCPAPELLGGPSVFLFPPKPKDTLMISRTPEVTCVVVDVSHEDPEVKFNWYVDGVEVHNAKTKPCEEQYGSTYRCVSVLTVLHQDWLNGKEYKCKVSNKALPAPIEKTISKAKGQPREPQVYTLPPSREEMTKNQVSLTCLVKGFYPSDIAVEWESNGQPENNYKTTPPVLDSDGSFFLYSKLTVDKSRWQQGNVFSCSVMHEALHNHYTQKSLSLSPGK

SEQ ID NO: 3401 - protein, 496 aa, synthetic construct
  REGION 1..496: note = source = /note="Description of Artificial Sequence: Synthetic polypeptide"
HGEGTFTSDVSSYLEGQAAKEFIAWLVKGGGGAPAPAPAPAPAPGQVQLVESGGGVVQPGRSLRLSCAASGFTFSYFGMHWVRQAPGKGLEWVAVIWYDGSNKYYADSVKGRFTISRDNSKNTLYLQMNSLRAEDTAVYYCARDGTIFGVLLGDYWGQGTLVTVSSASTKGPSVFPLAPSSKSTSGGTAALGCLVKDYFPEPVTVSWNSGALTSGVHTFPAVLQSSGLYSLSSVVTVPSSSLGTQTYICNVNHKPSNTKVDKKVEPKSCDKTHTCPPCPAPELLGGPSVFLFPPKPKDTLMISRTPEVTCVVVDVSHEDPEVKFNWYVDGVEVHNAKTKPCEEQYGSTYRCVSVLTVLHQDWLNGKEYKCKVSNKALPAPIEKTISKAKGQPREPQVYTLPPSREEMTKNQVSLTCLVKGFYPSDIAVEWESNGQPENNYKTTPPVLDSDGSFFLYSKLTVDKSRWQQGNVFSCSVMHEALHNHYTQKSLSLSPGK

SEQ ID NO: 3402 - protein, 500 aa, synthetic construct
  REGION 1..500: note = source = /note="Description of Artificial Sequence: Synthetic polypeptide"
HGEGTFTSDVSSYLEGQAAKEFIAWLVKGGGGAPAPAPAPAPAPAPAPGQVQLVESGGGVVQPGRSLRLSCAASGFTFSYFGMHWVRQAPGKGLEWVAVIWYDGSNKYYADSVKGRFTISRDNSKNTLYLQMNSLRAEDTAVYYCARDGTIFGVLLGDYWGQGTLVTVSSASTKGPSVFPLAPSSKSTSGGTAALGCLVKDYFPEPVTVSWNSGALTSGVHTFPAVLQSSGLYSLSSVVTVPSSSLGTQTYICNVNHKPSNTKVDKKVEPKSCDKTHTCPPCPAPELLGGPSVFLFPPKPKDTLMISRTPEVTCVVVDVSHEDPEVKFNWYVDGVEVHNAKTKPCEEQYGSTYRCVSVLTVLHQDWLNGKEYKCKVSNKALPAPIEKTISKAKGQPREPQVYTLPPSREEMTKNQVSLTCLVKGFYPSDIAVEWESNGQPENNYKTTPPVLDSDGSFFLYSKLTVDKSRWQQGNVFSCSVMHEALHNHYTQKSLSLSPGK

SEQ ID NO: 3403 - protein, 504 aa, synthetic construct
  REGION 1..504: note = source = /note="Description of Artificial Sequence: Synthetic polypeptide"
HGEGTFTSDVSSYLEGQAAKEFIAWLVKGGGGAPAPAPAPAPAPAPAPAPAPGQVQLVESGGGVVQPGRSLRLSCAASGFTFSYFGMHWVRQAPGKGLEWVAVIWYDGSNKYYADSVKGRFTISRDNSKNTLYLQMNSLRAEDTAVYYCARDGTIFGVLLGDYWGQGTLVTVSSASTKGPSVFPLAPSSKSTSGGTAALGCLVKDYFPEPVTVSWNSGALTSGVHTFPAVLQSSGLYSLSSVVTVPSSSLGTQTYICNVNHKPSNTKVDKKVEPKSCDKTHTCPPCPAPELLGGPSVFLFPPKPKDTLMISRTPEVTCVVVDVSHEDPEVKFNWYVDGVEVHNAKTKPCEEQYGSTYRCVSVLTVLHQDWLNGKEYKCKVSNKALPAPIEKTISKAKGQPREPQVYTLPPSREEMTKNQVSLTCLVKGFYPSDIAVEWESNGQPENNYKTTPPVLDSDGSFFLYSKLTVDKSRWQQGNVFSCSVMHEALHNHYTQKSLSLSPGK

SEQ ID NO: 3404 - protein, 505 aa, synthetic construct
  REGION 1..505: note = source = /note="Description of Artificial Sequence: Synthetic polypeptide"
HVEGTFTSDVSSYLEGQAAKEFIAWLVKGGGGSGSATGGSGSVASSGSGSATHLQVQLVESGGGVVQPGRSLRLSCAASGFTFSYFGMHWVRQAPGKGLEWVAVIWYDGSNKYYADSVKGRFTISRDNSKNTLYLQMNSLRAEDTAVYYCARDGTIFGVLLGDYWGQGTLVTVSSASTKGPSVFPLAPSSKSTSGGTAALGCLVKDYFPEPVTVSWNSGALTSGVHTFPAVLQSSGLYSLSSVVTVPSSSLGTQTYICNVNHKPSNTKVDKKVEPKSCDKTHTCPPCPAPELLGGPSVFLFPPKPKDTLMISRTPEVTCVVVDVSHEDPEVKFNWYVDGVEVHNAKTKPCEEQYGSTYRCVSVLTVLHQDWLNGKEYKCKVSNKALPAPIEKTISKAKGQPREPQVYTLPPSREEMTKNQVSLTCLVKGFYPSDIAVEWESNGQPENNYKTTPPVLDSDGSFFLYSKLTVDKSRWQQGNVFSCSVMHEALHNHYTQKSLSLSPGK

SEQ ID NO: 3405 - protein, 505 aa, synthetic construct
  REGION 1..505: note = source = /note="Description of Artificial Sequence: Synthetic polypeptide"
HSEGTFTSDVSSYLEGQAAKEFIAWLVKGGGGSGSATGGSGSVASSGSGSATHLQVQLVESGGGVVQPGRSLRLSCAASGFTFSYFGMHWVRQAPGKGLEWVAVIWYDGSNKYYADSVKGRFTISRDNSKNTLYLQMNSLRAEDTAVYYCARDGTIFGVLLGDYWGQGTLVTVSSASTKGPSVFPLAPSSKSTSGGTAALGCLVKDYFPEPVTVSWNSGALTSGVHTFPAVLQSSGLYSLSSVVTVPSSSLGTQTYICNVNHKPSNTKVDKKVEPKSCDKTHTCPPCPAPELLGGPSVFLFPPKPKDTLMISRTPEVTCVVVDVSHEDPEVKFNWYVDGVEVHNAKTKPCEEQYGSTYRCVSVLTVLHQDWLNGKEYKCKVSNKALPAPIEKTISKAKGQPREPQVYTLPPSREEMTKNQVSLTCLVKGFYPSDIAVEWESNGQPENNYKTTPPVLDSDGSFFLYSKLTVDKSRWQQGNVFSCSVMHEALHNHYTQKSLSLSPGK

SEQ ID NO: 3406 - protein, 505 aa, synthetic construct
  REGION 1..505: note = source = /note="Description of Artificial Sequence: Synthetic polypeptide"
HGQGTFTSDVSSYLEGQAAKEFIAWLVKGGGGSGSATGGSGSVASSGSGSATHLQVQLVESGGGVVQPGRSLRLSCAASGFTFSYFGMHWVRQAPGKGLEWVAVIWYDGSNKYYADSVKGRFTISRDNSKNTLYLQMNSLRAEDTAVYYCARDGTIFGVLLGDYWGQGTLVTVSSASTKGPSVFPLAPSSKSTSGGTAALGCLVKDYFPEPVTVSWNSGALTSGVHTFPAVLQSSGLYSLSSVVTVPSSSLGTQTYICNVNHKPSNTKVDKKVEPKSCDKTHTCPPCPAPELLGGPSVFLFPPKPKDTLMISRTPEVTCVVVDVSHEDPEVKFNWYVDGVEVHNAKTKPCEEQYGSTYRCVSVLTVLHQDWLNGKEYKCKVSNKALPAPIEKTISKAKGQPREPQVYTLPPSREEMTKNQVSLTCLVKGFYPSDIAVEWESNGQPENNYKTTPPVLDSDGSFFLYSKLTVDKSRWQQGNVFSCSVMHEALHNHYTQKSLSLSPGK

SEQ ID NO: 3407 - protein, 505 aa, synthetic construct
  REGION 1..505: note = source = /note="Description of Artificial Sequence: Synthetic polypeptide"
HVQGTFTSDVSSYLEGQAAKEFIAWLVKGGGGSGSATGGSGSVASSGSGSATHLQVQLVESGGGVVQPGRSLRLSCAASGFTFSYFGMHWVRQAPGKGLEWVAVIWYDGSNKYYADSVKGRFTISRDNSKNTLYLQMNSLRAEDTAVYYCARDGTIFGVLLGDYWGQGTLVTVSSASTKGPSVFPLAPSSKSTSGGTAALGCLVKDYFPEPVTVSWNSGALTSGVHTFPAVLQSSGLYSLSSVVTVPSSSLGTQTYICNVNHKPSNTKVDKKVEPKSCDKTHTCPPCPAPELLGGPSVFLFPPKPKDTLMISRTPEVTCVVVDVSHEDPEVKFNWYVDGVEVHNAKTKPCEEQYGSTYRCVSVLTVLHQDWLNGKEYKCKVSNKALPAPIEKTISKAKGQPREPQVYTLPPSREEMTKNQVSLTCLVKGFYPSDIAVEWESNGQPENNYKTTPPVLDSDGSFFLYSKLTVDKSRWQQGNVFSCSVMHEALHNHYTQKSLSLSPGK

SEQ ID NO: 3408 - protein, 505 aa, synthetic construct
  REGION 1..505: note = source = /note="Description of Artificial Sequence: Synthetic polypeptide"
HSQGTFTSDVSSYLEGQAAKEFIAWLVKGGGGSGSATGGSGSVASSGSGSATHLQVQLVESGGGVVQPGRSLRLSCAASGFTFSYFGMHWVRQAPGKGLEWVAVIWYDGSNKYYADSVKGRFTISRDNSKNTLYLQMNSLRAEDTAVYYCARDGTIFGVLLGDYWGQGTLVTVSSASTKGPSVFPLAPSSKSTSGGTAALGCLVKDYFPEPVTVSWNSGALTSGVHTFPAVLQSSGLYSLSSVVTVPSSSLGTQTYICNVNHKPSNTKVDKKVEPKSCDKTHTCPPCPAPELLGGPSVFLFPPKPKDTLMISRTPEVTCVVVDVSHEDPEVKFNWYVDGVEVHNAKTKPCEEQYGSTYRCVSVLTVLHQDWLNGKEYKCKVSNKALPAPIEKTISKAKGQPREPQVYTLPPSREEMTKNQVSLTCLVKGFYPSDIAVEWESNGQPENNYKTTPPVLDSDGSFFLYSKLTVDKSRWQQGNVFSCSVMHEALHNHYTQKSLSLSPGK

SEQ ID NO: 3409 - protein, 450 aa, synthetic construct
  REGION 1..450: note = source = /note="Description of Artificial Sequence: Synthetic polypeptide"
QVQLVESGGGVVQPGRSLRLSCAASGFTFSNYGMHWVRQAPGEGLEWVAAIWFDASDKYYADAVKGRFTISRDNSKNTLYLQMNSLRAEDTAVYYCARDQAIFGVVPDYWGQGTLVTVSSASTKGPSVFPLAPSSKSTSGGTAALGCLVKDYFPEPVTVSWNSGALTSGVHTFPAVLQSSGLYSLSSVVTVPSSSLGTQTYICNVNHKPSNTKVDKKVEPKSCDKTHTCPPCPAPELLGGPSVFLFPPKPKDTLMISRTPEVTCVVVDVSHEDPCVKFNWYVDGVEVHNAKTKPCEEQYGSTYRCVSVLTVLHQDWLNGKEYKCKVSNKALPAPIEKTISKAKGQPREPQVYTLPPSREEMTKNQVSLTCLVKGFYPSDIAVEWESNGQPENNYKTTPPVLDSDGSFFLYSKLTVDKSRWQQGNVFSCSVMHEALHNHYTQKSLSLSPGK

SEQ ID NO: 3410 - protein, 450 aa, synthetic construct; identical to SEQ ID NO: 3409
  REGION 1..450: note = source = /note="Description of Artificial Sequence: Synthetic polypeptide"

SEQ ID NO: 3411 - protein, 505 aa, synthetic construct
  REGION 1..505: note = source = /note="Description of Artificial Sequence: Synthetic polypeptide"
HVDGTFTSDVSSYLEGQAAKEFIAWLVKGGGGSGSATGGSGSVASSGSGSATHLQVQLVESGGGVVQPGRSLRLSCAASGFTFSYFGMHWVRQAPGKGLEWVAVIWYDGSNKYYADSVKGRFTISRDNSKNTLYLQMNSLRAEDTAVYYCARDGTIFGVLLGDYWGQGTLVTVSSASTKGPSVFPLAPSSKSTSGGTAALGCLVKDYFPEPVTVSWNSGALTSGVHTFPAVLQSSGLYSLSSVVTVPSSSLGTQTYICNVNHKPSNTKVDKKVEPKSCDKTHTCPPCPAPELLGGPSVFLFPPKPKDTLMISRTPEVTCVVVDVSHEDPEVKFNWYVDGVEVHNAKTKPCEEQYGSTYRCVSVLTVLHQDWLNGKEYKCKVSNKALPAPIEKTISKAKGQPREPQVYTLPPSREEMTKNQVSLTCLVKGFYPSDIAVEWESNGQPENNYKTTPPVLDSDGSFFLYSKLTVDKSRWQQGNVFSCSVMHEALHNHYTQKSLSLSPGK

SEQ ID NO: 3412 - protein, 505 aa, synthetic construct
  REGION 1..505: note = source = /note="Description of Artificial Sequence: Synthetic polypeptide"
HGHGTFTSDVSSYLEGQAAKEFIAWLVKGGGGSGSATGGSGSVASSGSGSATHLQVQLVESGGGVVQPGRSLRLSCAASGFTFSYFGMHWVRQAPGKGLEWVAVIWYDGSNKYYADSVKGRFTISRDNSKNTLYLQMNSLRAEDTAVYYCARDGTIFGVLLGDYWGQGTLVTVSSASTKGPSVFPLAPSSKSTSGGTAALGCLVKDYFPEPVTVSWNSGALTSGVHTFPAVLQSSGLYSLSSVVTVPSSSLGTQTYICNVNHKPSNTKVDKKVEPKSCDKTHTCPPCPAPELLGGPSVFLFPPKPKDTLMISRTPEVTCVVVDVSHEDPEVKFNWYVDGVEVHNAKTKPCEEQYGSTYRCVSVLTVLHQDWLNGKEYKCKVSNKALPAPIEKTISKAKGQPREPQVYTLPPSREEMTKNQVSLTCLVKGFYPSDIAVEWESNGQPENNYKTTPPVLDSDGSFFLYSKLTVDKSRWQQGNVFSCSVMHEALHNHYTQKSLSLSPGK

SEQ ID NO: 3413 - protein, 505 aa, synthetic construct; identical to SEQ ID NO: 3412
  REGION 1..505: note = source = /note="Description of Artificial Sequence: Synthetic polypeptide"

SEQ ID NO: 3414 - protein, 505 aa, synthetic construct
  REGION 1..505: note = source = /note="Description of Artificial Sequence: Synthetic polypeptide"
HVHGTFTSDVSSYLEGQAAKEFIAWLVKGGGGSGSATGGSGSVASSGSGSATHLQVQLVESGGGVVQPGRSLRLSCAASGFTFSYFGMHWVRQAPGKGLEWVAVIWYDGSNKYYADSVKGRFTISRDNSKNTLYLQMNSLRAEDTAVYYCARDGTIFGVLLGDYWGQGTLVTVSSASTKGPSVFPLAPSSKSTSGGTAALGCLVKDYFPEPVTVSWNSGALTSGVHTFPAVLQSSGLYSLSSVVTVPSSSLGTQTYICNVNHKPSNTKVDKKVEPKSCDKTHTCPPCPAPELLGGPSVFLFPPKPKDTLMISRTPEVTCVVVDVSHEDPEVKFNWYVDGVEVHNAKTKPCEEQYGSTYRCVSVLTVLHQDWLNGKEYKCKVSNKALPAPIEKTISKAKGQPREPQVYTLPPSREEMTKNQVSLTCLVKGFYPSDIAVEWESNGQPENNYKTTPPVLDSDGSFFLYSKLTVDKSRWQQGNVFSCSVMHEALHNHYTQKSLSLSPGK

SEQ ID NO: 3415 - protein, 505 aa, synthetic construct
  REGION 1..505: note = source = /note="Description of Artificial Sequence: Synthetic polypeptide"
HSHGTFTSDVSSYLEGQAAKEFIAWLVKGGGGSGSATGGSGSVASSGSGSATHLQVQLVESGGGVVQPGRSLRLSCAASGFTFSYFGMHWVRQAPGKGLEWVAVIWYDGSNKYYADSVKGRFTISRDNSKNTLYLQMNSLRAEDTAVYYCARDGTIFGVLLGDYWGQGTLVTVSSASTKGPSVFPLAPSSKSTSGGTAALGCLVKDYFPEPVTVSWNSGALTSGVHTFPAVLQSSGLYSLSSVVTVPSSSLGTQTYICNVNHKPSNTKVDKKVEPKSCDKTHTCPPCPAPELLGGPSVFLFPPKPKDTLMISRTPEVTCVVVDVSHEDPEVKFNWYVDGVEVHNAKTKPCEEQYGSTYRCVSVLTVLHQDWLNGKEYKCKVSNKALPAPIEKTISKAKGQPREPQVYTLPPSREEMTKNQVSLTCLVKGFYPSDIAVEWESNGQPENNYKTTPPVLDSDGSFFLYSKLTVDKSRWQQGNVFSCSVMHEALHNHYTQKSLSLSPGK

SEQ ID NO: 3416 - protein, 505 aa, synthetic construct
  REGION 1..505: note = source = /note="Description of Artificial Sequence: Synthetic polypeptide"
HGDGTFTSDVSSYLEGQAAKEFIAWLVKGGGGSGSATGGSGSVASSGSGSATHLQVQLVESGGGVVQPGRSLRLSCAASGFTFSYFGMHWVRQAPGKGLEWVAVIWYDGSNKYYADSVKGRFTISRDNSKNTLYLQMNSLRAEDTAVYYCARDGTIFGVLLGDYWGQGTLVTVSSASTKGPSVFPLAPSSKSTSGGTAALGCLVKDYFPEPVTVSWNSGALTSGVHTFPAVLQSSGLYSLSSVVTVPSSSLGTQTYICNVNHKPSNTKVDKKVEPKSCDKTHTCPPCPAPELLGGPSVFLFPPKPKDTLMISRTPEVTCVVVDVSHEDPEVKFNWYVDGVEVHNAKTKPCEEQYGSTYRCVSVLTVLHQDWLNGKEYKCKVSNKALPAPIEKTISKAKGQPREPQVYTLPPSREEMTKNQVSLTCLVKGFYPSDIAVEWESNGQPENNYKTTPPVLDSDGSFFLYSKLTVDKSRWQQGNVFSCSVMHEALHNHYTQKSLSLSPGK

SEQ ID NO: 3417 - protein, 505 aa, synthetic construct
  REGION 1..505: note = source = /note="Description of Artificial Sequence: Synthetic polypeptide"
HSDGTFTSDVSSYLEGQAAKEFIAWLVKGGGGSGSATGGSGSVASSGSGSATHLQVQLVESGGGVVQPGRSLRLSCAASGFTFSYFGMHWVRQAPGKGLEWVAVIWYDGSNKYYADSVKGRFTISRDNSKNTLYLQMNSLRAEDTAVYYCARDGTIFGVLLGDYWGQGTLVTVSSASTKGPSVFPLAPSSKSTSGGTAALGCLVKDYFPEPVTVSWNSGALTSGVHTFPAVLQSSGLYSLSSVVTVPSSSLGTQTYICNVNHKPSNTKVDKKVEPKSCDKTHTCPPCPAPELLGGPSVFLFPPKPKDTLMISRTPEVTCVVVDVSHEDPEVKFNWYVDGVEVHNAKTKPCEEQYGSTYRCVSVLTVLHQDWLNGKEYKCKVSNKALPAPIEKTISKAKGQPREPQVYTLPPSREEMTKNQVSLTCLVKGFYPSDIAVEWESNGQPENNYKTTPPVLDSDGSFFLYSKLTVDKSRWQQGNVFSCSVMHEALHNHYTQKSLSLSPGK

SEQ ID NO: 3418 - protein, 506 aa, synthetic construct
  REGION 1..506: note = source = /note="Description of Artificial Sequence: Synthetic polypeptide"
AHGEGTFTSDVSSYLEGQAAKEFIAWLVKGGGGSGSATGGSGSVASSGSGSATHLQVQLVESGGGVVQPGRSLRLSCAASGFTFSYFGMHWVRQAPGKGLEWVAVIWYDGSNKYYADSVKGRFTISRDNSKNTLYLQMNSLRAEDTAVYYCARDGTIFGVLLGDYWGQGTLVTVSSASTKGPSVFPLAPSSKSTSGGTAALGCLVKDYFPEPVTVSWNSGALTSGVHTFPAVLQSSGLYSLSSVVTVPSSSLGTQTYICNVNHKPSNTKVDKKVEPKSCDKTHTCPPCPAPELLGGPSVFLFPPKPKDTLMISRTPEVTCVVVDVSHEDPEVKFNWYVDGVEVHNAKTKPCEEQYGSTYRCVSVLTVLHQDWLNGKEYKCKVSNKALPAPIEKTISKAKGQPREPQVYTLPPSREEMTKNQVSLTCLVKGFYPSDIAVEWESNGQPENNYKTTPPVLDSDGSFFLYSKLTVDKSRWQQGNVFSCSVMHEALHNHYTQKSLSLSPGK

SEQ ID NO: 3419 - protein, 455 aa, synthetic construct
  REGION 1..455: note = source = /note="Description of Artificial Sequence: Synthetic polypeptide"
QVQLVESGGGVVQPGRSLRLSCAASGFTLSSYGMHWVRQAPGKGLEWVAVIWYDGSNKYYADSVKGRFTISRDNSKNTLYLQMNSLRAEDTAVYYCARGGGSGSYRYYYYGLDVWGQGTTVTVSSASTKGPSVFPLAPSSKSTSGGTAALGCLVKDYFPEPVTVSWNSGALTSGVHTFPAVLQSSGLYSLKSVVTVPSSSLGTQTYICNVNHKPSNTKVDKKVEPKSCDKTHTCPPCPAPELLGGPSVFLFPPKPKDTLMISRTPEVTCVVVDVSHEDPEVKFNWYVDGVEVHNAKTKPCEEQYGSTYRCVSVLTVLHQDWLNGKEYKCKVSNKALPAPIEKTISKAKGQPREPQVYTLPPSREEMTKNQVSLTCLVKGFYPSDIAVEWESNGQPENNYDTTPPVLDSDGSFFLYSDLTVDKSRWQQGNVFSCSVMHEALHNHYTQKSLSLSPGK

SEQ ID NO: 3420 - protein, 455 aa, synthetic construct
  REGION 1..455: note = source = /note="Description of Artificial Sequence: Synthetic polypeptide"
QVQLVESGGGVVQPGRSLRLSCAASGFTLSSYGMHWVRKAPGKGLEWVAVIWYDGSNKYYADSVKGRFTISRDNSKNTLYLQMNSLRAEDTAVYYCARGGGSGSYRYYYYGLDVWGQGTTVTVSSASTKGPSVFPLAPSSKSTSGGTAALGCLVKDYFPEPVTVSWNSGALTSGVHTFPAVLQSSGLYSLKSVVTVPSSSLGTQTYICNVNHKPSNTKVDKKVEPKSCDKTHTCPPCPAPELLGGPSVFLFPPKPKDTLMISRTPEVTCVVVDVSHEDPEVKFNWYVDGVEVHNAKTKPCEEQYGSTYRCVSVLTVLHQDWLNGKEYKCKVSNKALPAPIEKTISKAKGQPREPQVYTLPPSREEMTKNQVSLTCLVKGFYPSDIAVEWESNGQPENNYDTTPPVLDSDGSFFLYSDLTVDKSRWQQGNVFSCSVMHEALHNHYTQKSLSLSPGK

SEQ ID NO: 3421 - protein, 455 aa, synthetic construct
  REGION 1..455: note = source = /note="Description of Artificial Sequence: Synthetic polypeptide"
QVQLVESGGGVVQPGRSLRLSCAASGFTLSSYGMHWVRQAPGKKLEWVAVIWYDGSNKYYADSVKGRFTISRDNSKNTLYLQMNSLRAEDTAVYYCARGGGSGSYRYYYYGLDVWGQGTTVTVSSASTKGPSVFPLAPSSKSTSGGTAALGCLVKDYFPEPVTVSWNSGALTSGVHTFPAVLQSSGLYSLKSVVTVPSSSLGTQTYICNVNHKPSNTKVDKKVEPKSCDKTHTCPPCPAPELLGGPSVFLFPPKPKDTLMISRTPEVTCVVVDVSHEDPEVKFNWYVDGVEVHNAKTKPCEEQYGSTYRCVSVLTVLHQDWLNGKEYKCKVSNKALPAPIEKTISKAKGQPREPQVYTLPPSREEMTKNQVSLTCLVKGFYPSDIAVEWESNGQPENNYDTTPPVLDSDGSFFLYSDLTVDKSRWQQGNVFSCSVMHEALHNHYTQKSLSLSPGK

SEQ ID NO: 3422 - protein, 455 aa, synthetic construct; identical to SEQ ID NO: 3419
  REGION 1..455: note = source = /note="Description of Artificial Sequence: Synthetic polypeptide"

SEQ ID NO: 3423 - protein, 455 aa, synthetic construct; identical to SEQ ID NO: 3420
  REGION 1..455: note = source = /note="Description of Artificial Sequence: Synthetic polypeptide"

SEQ ID NO: 3424 - protein, 455 aa, synthetic construct; identical to SEQ ID NO: 3421
  REGION 1..455: note = source = /note="Description of Artificial Sequence: Synthetic polypeptide"

SEQ ID NO: 3425 - protein, 455 aa, synthetic construct; identical to SEQ ID NO: 3419
  REGION 1..455: note = source = /note="Description of Artificial Sequence: Synthetic polypeptide"

SEQ ID NO: 3426 - protein, 455 aa, synthetic construct; identical to SEQ ID NO: 3420
  REGION 1..455: note = source = /note="Description of Artificial Sequence: Synthetic polypeptide"

SEQ ID NO: 3427 - protein, 455 aa, synthetic construct; identical to SEQ ID NO: 3421
  REGION 1..455: note = source = /note="Description of Artificial Sequence: Synthetic polypeptide"

SEQ ID NO: 3428 - protein, 455 aa, synthetic construct; identical to SEQ ID NO: 3419
  REGION 1..455: note = source = /note="Description of Artificial Sequence: Synthetic polypeptide"

SEQ ID NO: 3429 - protein, 455 aa, synthetic construct; identical to SEQ ID NO: 3420
  REGION 1..455: note = source = /note="Description of Artificial Sequence: Synthetic polypeptide"

SEQ ID NO: 3430 - protein, 455 aa, synthetic construct; identical to SEQ ID NO: 3421
  REGION 1..455: note = source = /note="Description of Artificial Sequence: Synthetic polypeptide"

SEQ ID NO: 3431 - protein, 455 aa, synthetic construct; identical to SEQ ID NO: 3419
  REGION 1..455: note = source = /note="Description of Artificial Sequence: Synthetic polypeptide"

SEQ ID NO: 3432 - protein, 455 aa, synthetic construct; identical to SEQ ID NO: 3420
  REGION 1..455: note = source = /note="Description of Artificial Sequence: Synthetic polypeptide"

SEQ ID NO: 3433 - protein, 455 aa, synthetic construct; identical to SEQ ID NO: 3421
  REGION 1..455: note = source = /note="Description of Artificial Sequence: Synthetic polypeptide"

SEQ ID NO: 3434 - protein, 455 aa, synthetic construct; identical to SEQ ID NO: 3419
  REGION 1..455: note = source = /note="Description of Artificial Sequence: Synthetic polypeptide"

SEQ ID NO: 3435 - protein, 455 aa, synthetic construct; identical to SEQ ID NO: 3420
  REGION 1..455: note = source = /note="Description of Artificial Sequence: Synthetic polypeptide"

SEQ ID NO: 3436 - protein, 455 aa, synthetic construct; identical to SEQ ID NO: 3421
  REGION 1..455: note = source = /note="Description of Artificial Sequence: Synthetic polypeptide"

SEQ ID NO: 3437 - protein, 108 aa, synthetic construct; identical to SEQ ID NO: 10
  REGION 1..108: note = source = /note="Description of Artificial Sequence: Synthetic polypeptide"

SEQ ID NO: 3438 - protein, 108 aa, synthetic construct; identical to SEQ ID NO: 10
  REGION 1..108: note = source = /note="Description of Artificial Sequence: Synthetic polypeptide"

SEQ ID NO: 3439 - protein, 108 aa, synthetic construct; identical to SEQ ID NO: 10
  REGION 1..108: note = source = /note="Description of Artificial Sequence: Synthetic polypeptide"

SEQ ID NO: 3440 - protein, 108 aa, synthetic construct; identical to SEQ ID NO: 10
  REGION 1..108: note = source = /note="Description of Artificial Sequence: Synthetic polypeptide"

SEQ ID NO: 3441 - protein, 108 aa, synthetic construct; identical to SEQ ID NO: 10
  REGION 1..108: note = source = /note="Description of Artificial Sequence: Synthetic polypeptide"

SEQ ID NO: 3442 - protein, 108 aa, synthetic construct; identical to SEQ ID NO: 10
  REGION 1..108: note = source = /note="Description of Artificial Sequence: Synthetic polypeptide"

SEQ ID NO: 3443 - protein, 108 aa, synthetic construct; identical to SEQ ID NO: 10
  REGION 1..108: note = source = /note="Description of Artificial Sequence: Synthetic polypeptide"

SEQ ID NO: 3444 - protein, 108 aa, synthetic construct; identical to SEQ ID NO: 10
  REGION 1..108: note = source = /note="Description of Artificial Sequence: Synthetic polypeptide"

SEQ ID NO: 3445 - protein, 108 aa, synthetic construct; identical to SEQ ID NO: 10
  REGION 1..108: note = source = /note="Description of Artificial Sequence: Synthetic polypeptide"

SEQ ID NO: 3446 - protein, 108 aa, synthetic construct; identical to SEQ ID NO: 10
  REGION 1..108: note = source = /note="Description of Artificial Sequence: Synthetic polypeptide"

SEQ ID NO: 3447 - protein, 108 aa, synthetic construct; identical to SEQ ID NO: 10
  REGION 1..108: note = source = /note="Description of Artificial Sequence: Synthetic polypeptide"

SEQ ID NO: 3448 - protein, 214 aa, synthetic construct
  REGION 1..214: note = source = /note="Description of Artificial Sequence: Synthetic polypeptide"
EIVMTQSPATLSVSPGERATLSCRASQSVSSNLAWYQKKPGQAPRLLIYGAATRATGIPARVSGSGSGTEFTLTISSLQSEDFAVYYCQQYNNWPLTFGGGTKVEIKRTVAAPSVFIFPPSDEQLKSGTASVVCLLNNFYPREAKVQWKVDNALQSGNSQESVTEQDSKDSTYSLKSTLTLSKADYEKHKVYACEVTHQGLSSPVTKSFNRGEC

SEQ ID NO: 3449 - protein, 214 aa, synthetic construct; identical to SEQ ID NO: 3448
  REGION 1..214: note = source = /note="Description of Artificial Sequence: Synthetic polypeptide"

SEQ ID NO: 3450 - protein, 214 aa, synthetic construct; identical to SEQ ID NO: 3448
  REGION 1..214: note = source = /note="Description of Artificial Sequence: Synthetic polypeptide"

SEQ ID NO: 3451 - protein, 214 aa, synthetic construct; identical to SEQ ID NO: 3448
  REGION 1..214: note = source = /note="Description of Artificial Sequence: Synthetic polypeptide"

SEQ ID NO: 3452 - protein, 214 aa, synthetic construct; identical to SEQ ID NO: 3448
  REGION 1..214: note = source = /note="Description of Artificial Sequence: Synthetic polypeptide"

SEQ ID NO: 3453 - protein, 214 aa, synthetic construct; identical to SEQ ID NO: 3448
  REGION 1..214: note = source = /note="Description of Artificial Sequence: Synthetic polypeptide"

SEQ ID NO: 3454 - protein, 214 aa, synthetic construct; identical to SEQ ID NO: 3448
  REGION 1..214: note = source = /note="Description of Artificial Sequence: Synthetic polypeptide"

SEQ ID NO: 3455 - protein, 214 aa, synthetic construct; identical to SEQ ID NO: 3448
  REGION 1..214: note = source = /note="Description of Artificial Sequence: Synthetic polypeptide"

SEQ ID NO: 3456 - protein, 214 aa, synthetic construct; identical to SEQ ID NO: 3448
  REGION 1..214: note = source = /note="Description of Artificial Sequence: Synthetic polypeptide"

SEQ ID NO: 3457 - protein, 214 aa, synthetic construct; identical to SEQ ID NO: 3448
  REGION 1..214: note = source = /note="Description of Artificial Sequence: Synthetic polypeptide"

SEQ ID NO: 3458 - protein, 214 aa, synthetic construct; identical to SEQ ID NO: 3448
  REGION 1..214: note = source = /note="Description of Artificial Sequence: Synthetic polypeptide"

SEQ ID NO: 3459 - protein, 214 aa, synthetic construct
  REGION 1..214: note = source = /note="Description of Artificial Sequence: Synthetic polypeptide"
EIVMTQSPATLSVSPGERATLSCRASQSVSSNLAWYQQKPGQAPRLLIYGAATRATGIPARVSGSGSGTEFTLTISSLQSEDFAVYYCQQYNNWPLTFGKGTKVEIKRTVAAPSVFIFPPSDEQLKSGTASVVCLLNNFYPREAKVQWKVDNALQSGNSQESVTEQDSKDSTYSLKSTLTLSKADYEKHKVYACEVTHQGLSSPVTKSFNRGEC

SEQ ID NO: 3460 - protein, 214 aa, synthetic construct; identical to SEQ ID NO: 3459
  REGION 1..214: note = source = /note="Description of Artificial Sequence: Synthetic polypeptide"

SEQ ID NO: 3461 - protein, 214 aa, synthetic construct; identical to SEQ ID NO: 3459
  REGION 1..214: note = source = /note="Description of Artificial Sequence: Synthetic polypeptide"

SEQ ID NO: 3462 - protein, 214 aa, synthetic construct; identical to SEQ ID NO: 3459
  REGION 1..214: note = source = /note="Description of Artificial Sequence: Synthetic polypeptide"

SEQ ID NO: 3463 - protein, 214 aa, synthetic construct; identical to SEQ ID NO: 3459
  REGION 1..214: note = source = /note="Description of Artificial Sequence: Synthetic polypeptide"

SEQ ID NO: 3464 - protein, 214 aa, synthetic construct; identical to SEQ ID NO: 3459
  REGION 1..214: note = source = /note="Description of Artificial Sequence: Synthetic polypeptide"

SEQ ID NO: 3465 - protein, 214 aa, synthetic construct; identical to SEQ ID NO: 3459
  REGION 1..214: note = source = /note="Description of Artificial Sequence: Synthetic polypeptide"

SEQ ID NO: 3466 - protein, 214 aa, synthetic construct; identical to SEQ ID NO: 3459
  REGION 1..214: note = source = /note="Description of Artificial Sequence: Synthetic polypeptide"

SEQ ID NO: 3467 - protein, 214 aa, synthetic construct; identical to SEQ ID NO: 3459
  REGION 1..214: note = source = /note="Description of Artificial Sequence: Synthetic polypeptide"

SEQ ID NO: 3468 - protein, 214 aa, synthetic construct; identical to SEQ ID NO: 3459
  REGION 1..214: note = source = /note="Description of Artificial Sequence: Synthetic polypeptide"

SEQ ID NO: 3469 - protein, 214 aa, synthetic construct; identical to SEQ ID NO: 3459
  REGION 1..214: note = source = /note="Description of Artificial Sequence: Synthetic polypeptide"

SEQ ID NO: 3470 - protein, 450 aa, synthetic construct
  REGION 1..450: note = source = /note="Description of Artificial Sequence: Synthetic polypeptide"
QVQLVESGGGVVQPGRSLRLSCAASGFTFSNYGMHWVRQAPGKGLEWVAAIWFDASDKYYADAVKGRFTISRDNSKNTLYLQMNSLRAEDTAVYYCARDQAIFGVVPDYWGQGTLVTVSSASTKGPSVFPLAPSSKSTSGGTAALGCLVKDYFPEPVTVSWNSGALTSGVHTFPAVLQSSGLYSLSSVVTVPSSSLGTQTYICNVNHKPSNTKVDKKVEPKSCDKTHTCPPCPAPELLGGPSVFLFPPKPKDTLMISRTPEVTCVVVDVSHEDPCVKFNWYVDGVEVHNAKTKPCEEQYGSTYRCVSVLTVLHQDWLNGKEYKCKVSNKALPAPIEKTISKAKGQPREPQVYTLPPSREEMTKNQVSLTCLVKGFYPSDIAVEWESNGQPENNYKTTPPVLDSDGSFFLYSKLTVDKSRWQQGNVFSCSVMHEALHNHYTQKSLSLSPGK

SEQ ID NO: 3471 - protein, 505 aa, synthetic construct
  REGION 1..505: note = source = /note="Description of Artificial Sequence: Synthetic polypeptide"
HSEGTFTSDVSSYLEEQAAKEFIAWLVKGGGGSGSATGGSGSVASSGSGSATHLQVQLVESGGGVVQPGRSLRLSCAASGFTFSYFGMHWVRQAPGKGLEWVAVIWYDGSNKYYADSVKGRFTISRDNSKNTLYLQMNSLRAEDTAVYYCARDGTIFGVLLGDYWGQGTLVTVSSASTKGPSVFPLAPSSKSTSGGTAALGCLVKDYFPEPVTVSWNSGALTSGVHTFPAVLQSSGLYSLSSVVTVPSSSLGTQTYICNVNHKPSNTKVDKKVEPKSCDKTHTCPPCPAPELLGGPSVFLFPPKPKDTLMISRTPEVTCVVVDVSHEDPEVKFNWYVDGVEVHNAKTKPCEEQYGSTYRCVSVLTVLHQDWLNGKEYKCKVSNKALPAPIEKTISKAKGQPREPQVYTLPPSREEMTKNQVSLTCLVKGFYPSDIAVEWESNGQPENNYKTTPPVLDSDGSFFLYSKLTVDKSRWQQGNVFSCSVMHEALHNHYTQKSLSLSPGK

SEQ ID NO: 3472 - protein, 505 aa, synthetic construct
  REGION 1..505: note = source = /note="Description of Artificial Sequence: Synthetic polypeptide"
HSQGTFTSDVSSYLEEQAAKEFIAWLVKGGGGSGSATGGSGSVASSGSGSATHLQVQLVESGGGVVQPGRSLRLSCAASGFTFSYFGMHWVRQAPGKGLEWVAVIWYDGSNKYYADSVKGRFTISRDNSKNTLYLQMNSLRAEDTAVYYCARDGTIFGVLLGDYWGQGTLVTVSSASTKGPSVFPLAPSSKSTSGGTAALGCLVKDYFPEPVTVSWNSGALTSGVHTFPAVLQSSGLYSLSSVVTVPSSSLGTQTYICNVNHKPSNTKVDKKVEPKSCDKTHTCPPCPAPELLGGPSVFLFPPKPKDTLMISRTPEVTCVVVDVSHEDPEVKFNWYVDGVEVHNAKTKPCEEQYGSTYRCVSVLTVLHQDWLNGKEYKCKVSNKALPAPIEKTISKAKGQPREPQVYTLPPSREEMTKNQVSLTCLVKGFYPSDIAVEWESNGQPENNYKTTPPVLDSDGSFFLYSKLTVDKSRWQQGNVFSCSVMHEALHNHYTQKSLSLSPGK

SEQ ID NO: 3473 - protein, 505 aa, synthetic construct
  REGION 1..505: note = source = /note="Description of Artificial Sequence: Synthetic polypeptide"
HGDGTFTSDVSSYLEEQAAKEFIAWLVKGGGGSGSATGGSGSVASSGSGSATHLQVQLVESGGGVVQPGRSLRLSCAASGFTFSYFGMHWVRQAPGKGLEWVAVIWYDGSNKYYADSVKGRFTISRDNSKNTLYLQMNSLRAEDTAVYYCARDGTIFGVLLGDYWGQGTLVTVSSASTKGPSVFPLAPSSKSTSGGTAALGCLVKDYFPEPVTVSWNSGALTSGVHTFPAVLQSSGLYSLSSVVTVPSSSLGTQTYICNVNHKPSNTKVDKKVEPKSCDKTHTCPPCPAPELLGGPSVFLFPPKPKDTLMISRTPEVTCVVVDVSHEDPEVKFNWYVDGVEVHNAKTKPCEEQYGSTYRCVSVLTVLHQDWLNGKEYKCKVSNKALPAPIEKTISKAKGQPREPQVYTLPPSREEMTKNQVSLTCLVKGFYPSDIAVEWESNGQPENNYKTTPPVLDSDGSFFLYSKLTVDKSRWQQGNVFSCSVMHEALHNHYTQKSLSLSPGK

SEQ ID NO: 3474 - protein, 505 aa, synthetic construct
  REGION 1..505: note = source = /note="Description of Artificial Sequence: Synthetic polypeptide"
HSDGTFTSDVSSYLEEQAAKEFIAWLVKGGGGSGSATGGSGSVASSGSGSATHLQVQLVESGGGVVQPGRSLRLSCAASGFTFSYFGMHWVRQAPGKGLEWVAVIWYDGSNKYYADSVKGRFTISRDNSKNTLYLQMNSLRAEDTAVYYCARDGTIFGVLLGDYWGQGTLVTVSSASTKGPSVFPLAPSSKSTSGGTAALGCLVKDYFPEPVTVSWNSGALTSGVHTFPAVLQSSGLYSLSSVVTVPSSSLGTQTYICNVNHKPSNTKVDKKVEPKSCDKTHTCPPCPAPELLGGPSVFLFPPKPKDTLMISRTPEVTCVVVDVSHEDPEVKFNWYVDGVEVHNAKTKPCEEQYGSTYRCVSVLTVLHQDWLNGKEYKCKVSNKALPAPIEKTISKAKGQPREPQVYTLPPSREEMTKNQVSLTCLVKGFYPSDIAVEWESNGQPENNYKTTPPVLDSDGSFFLYSKLTVDKSRWQQGNVFSCSVMHEALHNHYTQKSLSLSPGK

SEQ ID NO: 3475 - protein, 505 aa, synthetic construct
  REGION 1..505: note = source = /note="Description of Artificial Sequence: Synthetic polypeptide"
HGEGTFTSDVSSYLEEQAAKEFIEWLVKGGGGSGSATGGSGSVASSGSGSATHLQVQLVESGGGVVQPGRSLRLSCAASGFTFSYFGMHWVRQAPGKGLEWVAVIWYDGSNKYYADSVKGRFTISRDNSKNTLYLQMNSLRAEDTAVYYCARDGTIFGVLLGDYWGQGTLVTVSSASTKGPSVFPLAPSSKSTSGGTAALGCLVKDYFPEPVTVSWNSGALTSGVHTFPAVLQSSGLYSLSSVVTVPSSSLGTQTYICNVNHKPSNTKVDKKVEPKSCDKTHTCPPCPAPELLGGPSVFLFPPKPKDTLMISRTPEVTCVVVDVSHEDPEVKFNWYVDGVEVHNAKTKPCEEQYGSTYRCVSVLTVLHQDWLNGKEYKCKVSNKALPAPIEKTISKAKGQPREPQVYTLPPSREEMTKNQVSLTCLVKGFYPSDIAVEWESNGQPENNYKTTPPVLDSDGSFFLYSKLTVDKSRWQQGNVFSCSVMHEALHNHYTQKSLSLSPGK

SEQ ID NO: 3476 - protein, 505 aa, synthetic construct
  REGION 1..505: note = source = /note="Description of Artificial Sequence: Synthetic polypeptide"
HSEGTFTSDVSSYLEEQAAKEFIEWLVKGGGGSGSATGGSGSVASSGSGSATHLQVQLVESGGGVVQPGRSLRLSCAASGFTFSYFGMHWVRQAPGKGLEWVAVIWYDGSNKYYADSVKGRFTISRDNSKNTLYLQMNSLRAEDTAVYYCARDGTIFGVLLGDYWGQGTLVTVSSASTKGPSVFPLAPSSKSTSGGTAALGCLVKDYFPEPVTVSWNSGALTSGVHTFPAVLQSSGLYSLSSVVTVPSSSLGTQTYICNVNHKPSNTKVDKKVEPKSCDKTHTCPPCPAPELLGGPSVFLFPPKPKDTLMISRTPEVTCVVVDVSHEDPEVKFNWYVDGVEVHNAKTKPCEEQYGSTYRCVSVLTVLHQDWLNGKEYKCKVSNKALPAPIEKTISKAKGQPREPQVYTLPPSREEMTKNQVSLTCLVKGFYPSDIAVEWESNGQPENNYKTTPPVLDSDGSFFLYSKLTVDKSRWQQGNVFSCSVMHEALHNHYTQKSLSLSPGK

SEQ ID NO: 3477 - protein, 505 aa, synthetic construct
  REGION 1..505: note = source = /note="Description of Artificial Sequence: Synthetic polypeptide"
HSQGTFTSDVSSYLEEQAAKEFIEWLVKGGGGSGSATGGSGSVASSGSGSATHLQVQLVESGGGVVQPGRSLRLSCAASGFTFSYFGMHWVRQAPGKGLEWVAVIWYDGSNKYYADSVKGRFTISRDNSKNTLYLQMNSLRAEDTAVYYCARDGTIFGVLLGDYWGQGTLVTVSSASTKGPSVFPLAPSSKSTSGGTAALGCLVKDYFPEPVTVSWNSGALTSGVHTFPAVLQSSGLYSLSSVVTVPSSSLGTQTYICNVNHKPSNTKVDKKVEPKSCDKTHTCPPCPAPELLGGPSVFLFPPKPKDTLMISRTPEVTCVVVDVSHEDPEVKFNWYVDGVEVHNAKTKPCEEQYGSTYRCVSVLTVLHQDWLNGKEYKCKVSNKALPAPIEKTISKAKGQPREPQVYTLPPSREEMTKNQVSLTCLVKGFYPSDIAVEWESNGQPENNYKTTPPVLDSDGSFFLYSKLTVDKSRWQQGNVFSCSVMHEALHNHYTQKSLSLSPGK

SEQ ID NO: 3478 - protein, 505 aa, synthetic construct
  REGION 1..505: note = source = /note="Description of Artificial Sequence: Synthetic polypeptide"
HGDGTFTSDVSSYLEEQAAKEFIEWLVKGGGGSGSATGGSGSVASSGSGSATHLQVQLVESGGGVVQPGRSLRLSCAASGFTFSYFGMHWVRQAPGKGLEWVAVIWYDGSNKYYADSVKGRFTISRDNSKNTLYLQMNSLRAEDTAVYYCARDGTIFGVLLGDYWGQGTLVTVSSASTKGPSVFPLAPSSKSTSGGTAALGCLVKDYFPEPVTVSWNSGALTSGVHTFPAVLQSSGLYSLSSVVTVPSSSLGTQTYICNVNHKPSNTKVDKKVEPKSCDKTHTCPPCPAPELLGGPSVFLFPPKPKDTLMISRTPEVTCVVVDVSHEDPEVKFNWYVDGVEVHNAKTKPCEEQYGSTYRCVSVLTVLHQDWLNGKEYKCKVSNKALPAPIEKTISKAKGQPREPQVYTLPPSREEMTKNQVSLTCLVKGFYPSDIAVEWESNGQPENNYKTTPPVLDSDGSFFLYSKLTVDKSRWQQGNVFSCSVMHEALHNHYTQKSLSLSPGK

SEQ ID NO: 3479 - protein, 505 aa, synthetic construct
  REGION 1..505: note = source = /note="Description of Artificial Sequence: Synthetic polypeptide"
HSDGTFTSDVSSYLEEQAAKEFIEWLVKGGGGSGSATGGSGSVASSGSGSATHLQVQLVESGGGVVQPGRSLRLSCAASGFTFSYFGMHWVRQAPGKGLEWVAVIWYDGSNKYYADSVKGRFTISRDNSKNTLYLQMNSLRAEDTAVYYCARDGTIFGVLLGDYWGQGTLVTVSSASTKGPSVFPLAPSSKSTSGGTAALGCLVKDYFPEPVTVSWNSGALTSGVHTFPAVLQSSGLYSLSSVVTVPSSSLGTQTYICNVNHKPSNTKVDKKVEPKSCDKTHTCPPCPAPELLGGPSVFLFPPKPKDTLMISRTPEVTCVVVDVSHEDPEVKFNWYVDGVEVHNAKTKPCEEQYGSTYRCVSVLTVLHQDWLNGKEYKCKVSNKALPAPIEKTISKAKGQPREPQVYTLPPSREEMTKNQVSLTCLVKGFYPSDIAVEWESNGQPENNYKTTPPVLDSDGSFFLYSKLTVDKSRWQQGNVFSCSVMHEALHNHYTQKSLSLSPGK

SEQ ID NO: 3480 - protein, 505 aa, synthetic construct
  REGION 1..505: note = source = /note="Description of Artificial Sequence: Synthetic polypeptide"
HGEGTFTSDVSSYLEEQAAKEFIAWLKNGGGGSGSATGGSGSVASSGSGSATHLQVQLVESGGGVVQPGRSLRLSCAASGFTFSYFGMHWVRQAPGKGLEWVAVIWYDGSNKYYADSVKGRFTISRDNSKNTLYLQMNSLRAEDTAVYYCARDGTIFGVLLGDYWGQGTLVTVSSASTKGPSVFPLAPSSKSTSGGTAALGCLVKDYFPEPVTVSWNSGALTSGVHTFPAVLQSSGLYSLSSVVTVPSSSLGTQTYICNVNHKPSNTKVDKKVEPKSCDKTHTCPPCPAPELLGGPSVFLFPPKPKDTLMISRTPEVTCVVVDVSHEDPEVKFNWYVDGVEVHNAKTKPCEEQYGSTYRCVSVLTVLHQDWLNGKEYKCKVSNKALPAPIEKTISKAKGQPREPQVYTLPPSREEMTKNQVSLTCLVKGFYPSDIAVEWESNGQPENNYKTTPPVLDSDGSFFLYSKLTVDKSRWQQGNVFSCSVMHEALHNHYTQKSLSLSPGK

SEQ ID NO: 3481 - protein, 505 aa, synthetic construct
  REGION 1..505: note = source = /note="Description of Artificial Sequence: Synthetic polypeptide"
HSEGTFTSDVSSYLEEQAAKEFIAWLKNGGGGSGSATGGSGSVASSGSGSATHLQVQLVESGGGVVQPGRSLRLSCAASGFTFSYFGMHWVRQAPGKGLEWVAVIWYDGSNKYYADSVKGRFTISRDNSKNTLYLQMNSLRAEDTAVYYCARDGTIFGVLLGDYWGQGTLVTVSSASTKGPSVFPLAPSSKSTSGGTAALGCLVKDYFPEPVTVSWNSGALTSGVHTFPAVLQSSGLYSLSSVVTVPSSSLGTQTYICNVNHKPSNTKVDKKVEPKSCDKTHTCPPCPAPELLGGPSVFLFPPKPKDTLMISRTPEVTCVVVDVSHEDPEVKFNWYVDGVEVHNAKTKPCEEQYGSTYRCVSVLTVLHQDWLNGKEYKCKVSNKALPAPIEKTISKAKGQPREPQVYTLPPSREEMTKNQVSLTCLVKGFYPSDIAVEWESNGQPENNYKTTPPVLDSDGSFFLYSKLTVDKSRWQQGNVFSCSVMHEALHNHYTQKSLSLSPGK

SEQ ID NO: 3482 - protein, 505 aa, synthetic construct
  REGION 1..505: note = source = /note="Description of Artificial Sequence: Synthetic polypeptide"
HSQGTFTSDVSSYLEEQAAKEFIAWLKNGGGGSGSATGGSGSVASSGSGSATHLQVQLVESGGGVVQPGRSLRLSCAASGFTFSYFGMHWVRQAPGKGLEWVAVIWYDGSNKYYADSVKGRFTISRDNSKNTLYLQMNSLRAEDTAVYYCARDGTIFGVLLGDYWGQGTLVTVSSASTKGPSVFPLAPSSKSTSGGTAALGCLVKDYFPEPVTVSWNSGALTSGVHTFPAVLQSSGLYSLSSVVTVPSSSLGTQTYICNVNHKPSNTKVDKKVEPKSCDKTHTCPPCPAPELLGGPSVFLFPPKPKDTLMISRTPEVTCVVVDVSHEDPEVKFNWYVDGVEVHNAKTKPCEEQYGSTYRCVSVLTVLHQDWLNGKEYKCKVSNKALPAPIEKTISKAKGQPREPQVYTLPPSREEMTKNQVSLTCLVKGFYPSDIAVEWESNGQPENNYKTTPPVLDSDGSFFLYSKLTVDKSRWQQGNVFSCSVMHEALHNHYTQKSLSLSPGK

SEQ ID NO: 3483 - protein, 505 aa, synthetic construct
  REGION 1..505: note = source = /note="Description of Artificial Sequence: Synthetic polypeptide"
HGDGTFTSDVSSYLEEQAAKEFIAWLKNGGGGSGSATGGSGSVASSGSGSATHLQVQLVESGGGVVQPGRSLRLSCAASGFTFSYFGMHWVRQAPGKGLEWVAVIWYDGSNKYYADSVKGRFTISRDNSKNTLYLQMNSLRAEDTAVYYCARDGTIFGVLLGDYWGQGTLVTVSSASTKGPSVFPLAPSSKSTSGGTAALGCLVKDYFPEPVTVSWNSGALTSGVHTFPAVLQSSGLYSLSSVVTVPSSSLGTQTYICNVNHKPSNTKVDKKVEPKSCDKTHTCPPCPAPELLGGPSVFLFPPKPKDTLMISRTPEVTCVVVDVSHEDPEVKFNWYVDGVEVHNAKTKPCEEQYGSTYRCVSVLTVLHQDWLNGKEYKCKVSNKALPAPIEKTISKAKGQPREPQVYTLPPSREEMTKNQVSLTCLVKGFYPSDIAVEWESNGQPENNYKTTPPVLDSDGSFFLYSKLTVDKSRWQQGNVFSCSVMHEALHNHYTQKSLSLSPGK

SEQ ID NO: 3484 - protein, 505 aa, synthetic construct
  REGION 1..505: note = source = /note="Description of Artificial Sequence: Synthetic polypeptide"
HSDGTFTSDVSSYLEEQAAKEFIAWLKNGGGGSGSATGGSGSVASSGSGSATHLQVQLVESGGGVVQPGRSLRLSCAASGFTFSYFGMHWVRQAPGKGLEWVAVIWYDGSNKYYADSVKGRFTISRDNSKNTLYLQMNSLRAEDTAVYYCARDGTIFGVLLGDYWGQGTLVTVSSASTKGPSVFPLAPSSKSTSGGTAALGCLVKDYFPEPVTVSWNSGALTSGVHTFPAVLQSSGLYSLSSVVTVPSSSLGTQTYICNVNHKPSNTKVDKKVEPKSCDKTHTCPPCPAPELLGGPSVFLFPPKPKDTLMISRTPEVTCVVVDVSHEDPEVKFNWYVDGVEVHNAKTKPCEEQYGSTYRCVSVLTVLHQDWLNGKEYKCKVSNKALPAPIEKTISKAKGQPREPQVYTLPPSREEMTKNQVSLTCLVKGFYPSDIAVEWESNGQPENNYKTTPPVLDSDGSFFLYSKLTVDKSRWQQGNVFSCSVMHEALHNHYTQKSLSLSPGK

SEQ ID NO: 3485 - protein, 505 aa, synthetic construct
  REGION 1..505: note = source = /note="Description of Artificial Sequence: Synthetic polypeptide"
HGEGTFTSDVSSYLEEQAAKEFIEWLKNGGGGSGSATGGSGSVASSGSGSATHLQVQLVESGGGVVQPGRSLRLSCAASGFTFSYFGMHWVRQAPGKGLEWVAVIWYDGSNKYYADSVKGRFTISRDNSKNTLYLQMNSLRAEDTAVYYCARDGTIFGVLLGDYWGQGTLVTVSSASTKGPSVFPLAPSSKSTSGGTAALGCLVKDYFPEPVTVSWNSGALTSGVHTFPAVLQSSGLYSLSSVVTVPSSSLGTQTYICNVNHKPSNTKVDKKVEPKSCDKTHTCPPCPAPELLGGPSVFLFPPKPKDTLMISRTPEVTCVVVDVSHEDPEVKFNWYVDGVEVHNAKTKPCEEQYGSTYRCVSVLTVLHQDWLNGKEYKCKVSNKALPAPIEKTISKAKGQPREPQVYTLPPSREEMTKNQVSLTCLVKGFYPSDIAVEWESNGQPENNYKTTPPVLDSDGSFFLYSKLTVDKSRWQQGNVFSCSVMHEALHNHYTQKSLSLSPGK

SEQ ID NO: 3486 - protein, 505 aa, synthetic construct
  REGION 1..505: note = source = /note="Description of Artificial Sequence: Synthetic polypeptide"
HSEGTFTSDVSSYLEEQAAKEFIEWLKNGGGGSGSATGGSGSVASSGSGSATHLQVQLVESGGGVVQPGRSLRLSCAASGFTFSYFGMHWVRQAPGKGLEWVAVIWYDGSNKYYADSVKGRFTISRDNSKNTLYLQMNSLRAEDTAVYYCARDGTIFGVLLGDYWGQGTLVTVSSASTKGPSVFPLAPSSKSTSGGTAALGCLVKDYFPEPVTVSWNSGALTSGVHTFPAVLQSSGLYSLSSVVTVPSSSLGTQTYICNVNHKPSNTKVDKKVEPKSCDKTHTCPPCPAPELLGGPSVFLFPPKPKDTLMISRTPEVTCVVVDVSHEDPEVKFNWYVDGVEVHNAKTKPCEEQYGSTYRCVSVLTVLHQDWLNGKEYKCKVSNKALPAPIEKTISKAKGQPREPQVYTLPPSREEMTKNQVSLTCLVKGFYPSDIAVEWESNGQPENNYKTTPPVLDSDGSFFLYSKLTVDKSRWQQGNVFSCSVMHEALHNHYTQKSLSLSPGK

SEQ ID NO: 3487 - protein, 505 aa, synthetic construct; identical to SEQ ID NO: 3486
  REGION 1..505: note = source = /note="Description of Artificial Sequence: Synthetic polypeptide"

SEQ ID NO: 3488 - protein, 505 aa, synthetic construct
  REGION 1..505: note = source = /note="Description of Artificial Sequence: Synthetic polypeptide"
HSQGTFTSDVSSYLEEQAAKEFIEWLKNGGGGSGSATGGSGSVASSGSGSATHLQVQLVESGGGVVQPGRSLRLSCAASGFTFSYFGMHWVRQAPGKGLEWVAVIWYDGSNKYYADSVKGRFTISRDNSKNTLYLQMNSLRAEDTAVYYCARDGTIFGVLLGDYWGQGTLVTVSSASTKGPSVFPLAPSSKSTSGGTAALGCLVKDYFPEPVTVSWNSGALTSGVHTFPAVLQSSGLYSLSSVVTVPSSSLGTQTYICNVNHKPSNTKVDKKVEPKSCDKTHTCPPCPAPELLGGPSVFLFPPKPKDTLMISRTPEVTCVVVDVSHEDPEVKFNWYVDGVEVHNAKTKPCEEQYGSTYRCVSVLTVLHQDWLNGKEYKCKVSNKALPAPIEKTISKAKGQPREPQVYTLPPSREEMTKNQVSLTCLVKGFYPSDIAVEWESNGQPENNYKTTPPVLDSDGSFFLYSKLTVDKSRWQQGNVFSCSVMHEALHNHYTQKSLSLSPGK

SEQ ID NO: 3489 - protein, 505 aa, synthetic construct
  REGION 1..505: note = source = /note="Description of Artificial Sequence: Synthetic polypeptide"
HGDGTFTSDVSSYLEEQAAKEFIEWLKNGGGGSGSATGGSGSVASSGSGSATHLQVQLVESGGGVVQPGRSLRLSCAASGFTFSYFGMHWVRQAPGKGLEWVAVIWYDGSNKYYADSVKGRFTISRDNSKNTLYLQMNSLRAEDTAVYYCARDGTIFGVLLGDYWGQGTLVTVSSASTKGPSVFPLAPSSKSTSGGTAALGCLVKDYFPEPVTVSWNSGALTSGVHTFPAVLQSSGLYSLSSVVTVPSSSLGTQTYICNVNHKPSNTKVDKKVEPKSCDKTHTCPPCPAPELLGGPSVFLFPPKPKDTLMISRTPEVTCVVVDVSHEDPEVKFNWYVDGVEVHNAKTKPCEEQYGSTYRCVSVLTVLHQDWLNGKEYKCKVSNKALPAPIEKTISKAKGQPREPQVYTLPPSREEMTKNQVSLTCLVKGFYPSDIAVEWESNGQPENNYKTTPPVLDSDGSFFLYSKLTVDKSRWQQGNVFSCSVMHEALHNHYTQKSLSLSPGK

SEQ ID NO: 3490 - protein, 505 aa, synthetic construct
  REGION 1..505: note = source = /note="Description of Artificial Sequence: Synthetic polypeptide"
HSDGTFTSDVSSYLEEQAAKEFIEWLKNGGGGSGSATGGSGSVASSGSGSATHLQVQLVESGGGVVQPGRSLRLSCAASGFTFSYFGMHWVRQAPGKGLEWVAVIWYDGSNKYYADSVKGRFTISRDNSKNTLYLQMNSLRAEDTAVYYCARDGTIFGVLLGDYWGQGTLVTVSSASTKGPSVFPLAPSSKSTSGGTAALGCLVKDYFPEPVTVSWNSGALTSGVHTFPAVLQSSGLYSLSSVVTVPSSSLGTQTYICNVNHKPSNTKVDKKVEPKSCDKTHTCPPCPAPELLGGPSVFLFPPKPKDTLMISRTPEVTCVVVDVSHEDPEVKFNWYVDGVEVHNAKTKPCEEQYGSTYRCVSVLTVLHQDWLNGKEYKCKVSNKALPAPIEKTISKAKGQPREPQVYTLPPSREEMTKNQVSLTCLVKGFYPSDIAVEWESNGQPENNYKTTPPVLDSDGSFFLYSKLTVDKSRWQQGNVFSCSVMHEALHNHYTQKSLSLSPGK

SEQ ID NO: 3491 - protein, 501 aa, synthetic construct
  REGION 1..501: note = source = /note="Description of Artificial Sequence: Synthetic polypeptide"
HGEGTFTSDVSSYLEEQAAKEFIAWLVKGGGGGGGAGGGGAGGGGAGGGGQVQLVESGGGVVQPGRSLRLSCAASGFTFSYFGMHWVRQAPGKGLEWVAVIWYDGSNKYYADSVKGRFTISRDNSKNTLYLQMNSLRAEDTAVYYCARDGTIFGVLLGDYWGQGTLVTVSSASTKGPSVFPLAPSSKSTSGGTAALGCLVKDYFPEPVTVSWNSGALTSGVHTFPAVLQSSGLYSLSSVVTVPSSSLGTQTYICNVNHKPSNTKVDKKVEPKSCDKTHTCPPCPAPELLGGPSVFLFPPKPKDTLMISRTPEVTCVVVDVSHEDPEVKFNWYVDGVEVHNAKTKPCEEQYGSTYRCVSVLTVLHQDWLNGKEYKCKVSNKALPAPIEKTISKAKGQPREPQVYTLPPSREEMTKNQVSLTCLVKGFYPSDIAVEWESNGQPENNYKTTPPVLDSDGSFFLYSKLTVDKSRWQQGNVFSCSVMHEALHNHYTQKSLSLSPGK

SEQ ID NO: 3492 - protein, 501 aa, synthetic construct
  REGION 1..501: note = source = /note="Description of Artificial Sequence: Synthetic polypeptide"
HSEGTFTSDVSSYLEEQAAKEFIAWLVKGGGGGGGAGGGGAGGGGAGGGGQVQLVESGGGVVQPGRSLRLSCAASGFTFSYFGMHWVRQAPGKGLEWVAVIWYDGSNKYYADSVKGRFTISRDNSKNTLYLQMNSLRAEDTAVYYCARDGTIFGVLLGDYWGQGTLVTVSSASTKGPSVFPLAPSSKSTSGGTAALGCLVKDYFPEPVTVSWNSGALTSGVHTFPAVLQSSGLYSLSSVVTVPSSSLGTQTYICNVNHKPSNTKVDKKVEPKSCDKTHTCPPCPAPELLGGPSVFLFPPKPKDTLMISRTPEVTCVVVDVSHEDPEVKFNWYVDGVEVHNAKTKPCEEQYGSTYRCVSVLTVLHQDWLNGKEYKCKVSNKALPAPIEKTISKAKGQPREPQVYTLPPSREEMTKNQVSLTCLVKGFYPSDIAVEWESNGQPENNYKTTPPVLDSDGSFFLYSKLTVDKSRWQQGNVFSCSVMHEALHNHYTQKSLSLSPGK

SEQ ID NO: 3493 - protein, 501 aa, synthetic construct
  REGION 1..501: note = source = /note="Description of Artificial Sequence: Synthetic polypeptide"
HSQGTFTSDVSSYLEEQAAKEFIAWLVKGGGGGGGAGGGGAGGGGAGGGGQVQLVESGGGVVQPGRSLRLSCAASGFTFSYFGMHWVRQAPGKGLEWVAVIWYDGSNKYYADSVKGRFTISRDNSKNTLYLQMNSLRAEDTAVYYCARDGTIFGVLLGDYWGQGTLVTVSSASTKGPSVFPLAPSSKSTSGGTAALGCLVKDYFPEPVTVSWNSGALTSGVHTFPAVLQSSGLYSLSSVVTVPSSSLGTQTYICNVNHKPSNTKVDKKVEPKSCDKTHTCPPCPAPELLGGPSVFLFPPKPKDTLMISRTPEVTCVVVDVSHEDPEVKFNWYVDGVEVHNAKTKPCEEQYGSTYRCVSVLTVLHQDWLNGKEYKCKVSNKALPAPIEKTISKAKGQPREPQVYTLPPSREEMTKNQVSLTCLVKGFYPSDIAVEWESNGQPENNYKTTPPVLDSDGSFFLYSKLTVDKSRWQQGNVFSCSVMHEALHNHYTQKSLSLSPGK

SEQ ID NO: 3494 - protein, 501 aa, synthetic construct
  REGION 1..501: note = source = /note="Description of Artificial Sequence: Synthetic polypeptide"
HGDGTFTSDVSSYLEEQAAKEFIAWLVKGGGGGGGAGGGGAGGGGAGGGGQVQLVESGGGVVQPGRSLRLSCAASGFTFSYFGMHWVRQAPGKGLEWVAVIWYDGSNKYYADSVKGRFTISRDNSKNTLYLQMNSLRAEDTAVYYCARDGTIFGVLLGDYWGQGTLVTVSSASTKGPSVFPLAPSSKSTSGGTAALGCLVKDYFPEPVTVSWNSGALTSGVHTFPAVLQSSGLYSLSSVVTVPSSSLGTQTYICNVNHKPSNTKVDKKVEPKSCDKTHTCPPCPAPELLGGPSVFLFPPKPKDTLMISRTPEVTCVVVDVSHEDPEVKFNWYVDGVEVHNAKTKPCEEQYGSTYRCVSVLTVLHQDWLNGKEYKCKVSNKALPAPIEKTISKAKGQPREPQVYTLPPSREEMTKNQVSLTCLVKGFYPSDIAVEWESNGQPENNYKTTPPVLDSDGSFFLYSKLTVDKSRWQQGNVFSCSVMHEALHNHYTQKSLSLSPGK

SEQ ID NO: 3495 - protein, 501 aa, synthetic construct
  REGION 1..501: note = source = /note="Description of Artificial Sequence: Synthetic polypeptide"
HSDGTFTSDVSSYLEEQAAKEFIAWLVKGGGGGGGAGGGGAGGGGAGGGGQVQLVESGGGVVQPGRSLRLSCAASGFTFSYFGMHWVRQAPGKGLEWVAVIWYDGSNKYYADSVKGRFTISRDNSKNTLYLQMNSLRAEDTAVYYCARDGTIFGVLLGDYWGQGTLVTVSSASTKGPSVFPLAPSSKSTSGGTAALGCLVKDYFPEPVTVSWNSGALTSGVHTFPAVLQSSGLYSLSSVVTVPSSSLGTQTYICNVNHKPSNTKVDKKVEPKSCDKTHTCPPCPAPELLGGPSVFLFPPKPKDTLMISRTPEVTCVVVDVSHEDPEVKFNWYVDGVEVHNAKTKPCEEQYGSTYRCVSVLTVLHQDWLNGKEYKCKVSNKALPAPIEKTISKAKGQPREPQVYTLPPSREEMTKNQVSLTCLVKGFYPSDIAVEWESNGQPENNYKTTPPVLDSDGSFFLYSKLTVDKSRWQQGNVFSCSVMHEALHNHYTQKSLSLSPGK

SEQ ID NO: 3496 - protein, 501 aa, synthetic construct
  REGION 1..501: note = source = /note="Description of Artificial Sequence: Synthetic polypeptide"
HGEGTFTSDVSSYLEEQAAKEFIEWLVKGGGGGGGAGGGGAGGGGAGGGGQVQLVESGGGVVQPGRSLRLSCAASGFTFSYFGMHWVRQAPGKGLEWVAVIWYDGSNKYYADSVKGRFTISRDNSKNTLYLQMNSLRAEDTAVYYCARDGTIFGVLLGDYWGQGTLVTVSSASTKGPSVFPLAPSSKSTSGGTAALGCLVKDYFPEPVTVSWNSGALTSGVHTFPAVLQSSGLYSLSSVVTVPSSSLGTQTYICNVNHKPSNTKVDKKVEPKSCDKTHTCPPCPAPELLGGPSVFLFPPKPKDTLMISRTPEVTCVVVDVSHEDPEVKFNWYVDGVEVHNAKTKPCEEQYGSTYRCVSVLTVLHQDWLNGKEYKCKVSNKALPAPIEKTISKAKGQPREPQVYTLPPSREEMTKNQVSLTCLVKGFYPSDIAVEWESNGQPENNYKTTPPVLDSDGSFFLYSKLTVDKSRWQQGNVFSCSVMHEALHNHYTQKSLSLSPGK

SEQ ID NO: 3497 - protein, 501 aa, synthetic construct
  REGION 1..501: note = source = /note="Description of Artificial Sequence: Synthetic polypeptide"
HSEGTFTSDVSSYLEEQAAKEFIEWLVKGGGGGGGAGGGGAGGGGAGGGGQVQLVESGGGVVQPGRSLRLSCAASGFTFSYFGMHWVRQAPGKGLEWVAVIWYDGSNKYYADSVKGRFTISRDNSKNTLYLQMNSLRAEDTAVYYCARDGTIFGVLLGDYWGQGTLVTVSSASTKGPSVFPLAPSSKSTSGGTAALGCLVKDYFPEPVTVSWNSGALTSGVHTFPAVLQSSGLYSLSSVVTVPSSSLGTQTYICNVNHKPSNTKVDKKVEPKSCDKTHTCPPCPAPELLGGPSVFLFPPKPKDTLMISRTPEVTCVVVDVSHEDPEVKFNWYVDGVEVHNAKTKPCEEQYGSTYRCVSVLTVLHQDWLNGKEYKCKVSNKALPAPIEKTISKAKGQPREPQVYTLPPSREEMTKNQVSLTCLVKGFYPSDIAVEWESNGQPENNYKTTPPVLDSDGSFFLYSKLTVDKSRWQQGNVFSCSVMHEALHNHYTQKSLSLSPGK

SEQ ID NO: 3498 - protein, 501 aa, synthetic construct
  REGION 1..501: note = source = /note="Description of Artificial Sequence: Synthetic polypeptide"
HSQGTFTSDVSSYLEEQAAKEFIEWLVKGGGGGGGAGGGGAGGGGAGGGGQVQLVESGGGVVQPGRSLRLSCAASGFTFSYFGMHWVRQAPGKGLEWVAVIWYDGSNKYYADSVKGRFTISRDNSKNTLYLQMNSLRAEDTAVYYCARDGTIFGVLLGDYWGQGTLVTVSSASTKGPSVFPLAPSSKSTSGGTAALGCLVKDYFPEPVTVSWNSGALTSGVHTFPAVLQSSGLYSLSSVVTVPSSSLGTQTYICNVNHKPSNTKVDKKVEPKSCDKTHTCPPCPAPELLGGPSVFLFPPKPKDTLMISRTPEVTCVVVDVSHEDPEVKFNWYVDGVEVHNAKTKPCEEQYGSTYRCVSVLTVLHQDWLNGKEYKCKVSNKALPAPIEKTISKAKGQPREPQVYTLPPSREEMTKNQVSLTCLVKGFYPSDIAVEWESNGQPENNYKTTPPVLDSDGSFFLYSKLTVDKSRWQQGNVFSCSVMHEALHNHYTQKSLSLSPGK

SEQ ID NO: 3499 - protein, 501 aa, synthetic construct
  REGION 1..501: note = source = /note="Description of Artificial Sequence: Synthetic polypeptide"
HGDGTFTSDVSSYLEEQAAKEFIEWLVKGGGGGGGAGGGGAGGGGAGGGGQVQLVESGGGVVQPGRSLRLSCAASGFTFSYFGMHWVRQAPGKGLEWVAVIWYDGSNKYYADSVKGRFTISRDNSKNTLYLQMNSLRAEDTAVYYCARDGTIFGVLLGDYWGQGTLVTVSSASTKGPSVFPLAPSSKSTSGGTAALGCLVKDYFPEPVTVSWNSGALTSGVHTFPAVLQSSGLYSLSSVVTVPSSSLGTQTYICNVNHKPSNTKVDKKVEPKSCDKTHTCPPCPAPELLGGPSVFLFPPKPKDTLMISRTPEVTCVVVDVSHEDPEVKFNWYVDGVEVHNAKTKPCEEQYGSTYRCVSVLTVLHQDWLNGKEYKCKVSNKALPAPIEKTISKAKGQPREPQVYTLPPSREEMTKNQVSLTCLVKGFYPSDIAVEWESNGQPENNYKTTPPVLDSDGSFFLYSKLTVDKSRWQQGNVFSCSVMHEALHNHYTQKSLSLSPGK

SEQ ID NO: 3500 - protein, 501 aa, synthetic construct
  REGION 1..501: note = source = /note="Description of Artificial Sequence: Synthetic polypeptide"
HSDGTFTSDVSSYLEEQAAKEFIEWLVKGGGGGGGAGGGGAGGGGAGGGGQVQLVESGGGVVQPGRSLRLSCAASGFTFSYFGMHWVRQAPGKGLEWVAVIWYDGSNKYYADSVKGRFTISRDNSKNTLYLQMNSLRAEDTAVYYCARDGTIFGVLLGDYWGQGTLVTVSSASTKGPSVFPLAPSSKSTSGGTAALGCLVKDYFPEPVTVSWNSGALTSGVHTFPAVLQSSGLYSLSSVVTVPSSSLGTQTYICNVNHKPSNTKVDKKVEPKSCDKTHTCPPCPAPELLGGPSVFLFPPKPKDTLMISRTPEVTCVVVDVSHEDPEVKFNWYVDGVEVHNAKTKPCEEQYGSTYRCVSVLTVLHQDWLNGKEYKCKVSNKALPAPIEKTISKAKGQPREPQVYTLPPSREEMTKNQVSLTCLVKGFYPSDIAVEWESNGQPENNYKTTPPVLDSDGSFFLYSKLTVDKSRWQQGNVFSCSVMHEALHNHYTQKSLSLSPGK

SEQ ID NO: 3501 - protein, 501 aa, synthetic construct
  REGION 1..501: note = source = /note="Description of Artificial Sequence: Synthetic polypeptide"
HGEGTFTSDVSSYLEEQAAKEFIAWLKNGGGGGGGAGGGGAGGGGAGGGGQVQLVESGGGVVQPGRSLRLSCAASGFTFSYFGMHWVRQAPGKGLEWVAVIWYDGSNKYYADSVKGRFTISRDNSKNTLYLQMNSLRAEDTAVYYCARDGTIFGVLLGDYWGQGTLVTVSSASTKGPSVFPLAPSSKSTSGGTAALGCLVKDYFPEPVTVSWNSGALTSGVHTFPAVLQSSGLYSLSSVVTVPSSSLGTQTYICNVNHKPSNTKVDKKVEPKSCDKTHTCPPCPAPELLGGPSVFLFPPKPKDTLMISRTPEVTCVVVDVSHEDPEVKFNWYVDGVEVHNAKTKPCEEQYGSTYRCVSVLTVLHQDWLNGKEYKCKVSNKALPAPIEKTISKAKGQPREPQVYTLPPSREEMTKNQVSLTCLVKGFYPSDIAVEWESNGQPENNYKTTPPVLDSDGSFFLYSKLTVDKSRWQQGNVFSCSVMHEALHNHYTQKSLSLSPGK

SEQ ID NO: 3502 - protein, 501 aa, synthetic construct
  REGION 1..501: note = source = /note="Description of Artificial Sequence: Synthetic polypeptide"
HSEGTFTSDVSSYLEEQAAKEFIAWLKNGGGGGGGAGGGGAGGGGAGGGGQVQLVESGGGVVQPGRSLRLSCAASGFTFSYFGMHWVRQAPGKGLEWVAVIWYDGSNKYYADSVKGRFTISRDNSKNTLYLQMNSLRAEDTAVYYCARDGTIFGVLLGDYWGQGTLVTVSSASTKGPSVFPLAPSSKSTSGGTAALGCLVKDYFPEPVTVSWNSGALTSGVHTFPAVLQSSGLYSLSSVVTVPSSSLGTQTYICNVNHKPSNTKVDKKVEPKSCDKTHTCPPCPAPELLGGPSVFLFPPKPKDTLMISRTPEVTCVVVDVSHEDPEVKFNWYVDGVEVHNAKTKPCEEQYGSTYRCVSVLTVLHQDWLNGKEYKCKVSNKALPAPIEKTISKAKGQPREPQVYTLPPSREEMTKNQVSLTCLVKGFYPSDIAVEWESNGQPENNYKTTPPVLDSDGSFFLYSKLTVDKSRWQQGNVFSCSVMHEALHNHYTQKSLSLSPGK

SEQ ID NO: 3503 - protein, 501 aa, synthetic construct
  REGION 1..501: note = source = /note="Description of Artificial Sequence: Synthetic polypeptide"
HSQGTFTSDVSSYLEEQAAKEFIAWLKNGGGGGGGAGGGGAGGGGAGGGGQVQLVESGGGVVQPGRSLRLSCAASGFTFSYFGMHWVRQAPGKGLEWVAVIWYDGSNKYYADSVKGRFTISRDNSKNTLYLQMNSLRAEDTAVYYCARDGTIFGVLLGDYWGQGTLVTVSSASTKGPSVFPLAPSSKSTSGGTAALGCLVKDYFPEPVTVSWNSGALTSGVHTFPAVLQSSGLYSLSSVVTVPSSSLGTQTYICNVNHKPSNTKVDKKVEPKSCDKTHTCPPCPAPELLGGPSVFLFPPKPKDTLMISRTPEVTCVVVDVSHEDPEVKFNWYVDGVEVHNAKTKPCEEQYGSTYRCVSVLTVLHQDWLNGKEYKCKVSNKALPAPIEKTISKAKGQPREPQVYTLPPSREEMTKNQVSLTCLVKGFYPSDIAVEWESNGQPENNYKTTPPVLDSDGSFFLYSKLTVDKSRWQQGNVFSCSVMHEALHNHYTQKSLSLSPGK

SEQ ID NO: 3504 - protein, 501 aa, synthetic construct
  REGION 1..501: note = source = /note="Description of Artificial Sequence: Synthetic polypeptide"
HGDGTFTSDVSSYLEEQAAKEFIAWLKNGGGGGGGAGGGGAGGGGAGGGGQVQLVESGGGVVQPGRSLRLSCAASGFTFSYFGMHWVRQAPGKGLEWVAVIWYDGSNKYYADSVKGRFTISRDNSKNTLYLQMNSLRAEDTAVYYCARDGTIFGVLLGDYWGQGTLVTVSSASTKGPSVFPLAPSSKSTSGGTAALGCLVKDYFPEPVTVSWNSGALTSGVHTFPAVLQSSGLYSLSSVVTVPSSSLGTQTYICNVNHKPSNTKVDKKVEPKSCDKTHTCPPCPAPELLGGPSVFLFPPKPKDTLMISRTPEVTCVVVDVSHEDPEVKFNWYVDGVEVHNAKTKPCEEQYGSTYRCVSVLTVLHQDWLNGKEYKCKVSNKALPAPIEKTISKAKGQPREPQVYTLPPSREEMTKNQVSLTCLVKGFYPSDIAVEWESNGQPENNYKTTPPVLDSDGSFFLYSKLTVDKSRWQQGNVFSCSVMHEALHNHYTQKSLSLSPGK

SEQ ID NO: 3505 - protein, 501 aa, synthetic construct
  REGION 1..501: note = source = /note="Description of Artificial Sequence: Synthetic polypeptide"
HSDGTFTSDVSSYLEEQAAKEFIAWLKNGGGGGGGAGGGGAGGGGAGGGGQVQLVESGGGVVQPGRSLRLSCAASGFTFSYFGMHWVRQAPGKGLEWVAVIWYDGSNKYYADSVKGRFTISRDNSKNTLYLQMNSLRAEDTAVYYCARDGTIFGVLLGDYWGQGTLVTVSSASTKGPSVFPLAPSSKSTSGGTAALGCLVKDYFPEPVTVSWNSGALTSGVHTFPAVLQSSGLYSLSSVVTVPSSSLGTQTYICNVNHKPSNTKVDKKVEPKSCDKTHTCPPCPAPELLGGPSVFLFPPKPKDTLMISRTPEVTCVVVDVSHEDPEVKFNWYVDGVEVHNAKTKPCEEQYGSTYRCVSVLTVLHQDWLNGKEYKCKVSNKALPAPIEKTISKAKGQPREPQVYTLPPSREEMTKNQVSLTCLVKGFYPSDIAVEWESNGQPENNYKTTPPVLDSDGSFFLYSKLTVDKSRWQQGNVFSCSVMHEALHNHYTQKSLSLSPGK

SEQ ID NO: 3506 - protein, 501 aa, synthetic construct
  REGION 1..501: note = source = /note="Description of Artificial Sequence: Synthetic polypeptide"
HGEGTFTSDVSSYLEEQAAKEFIEWLKNGGGGGGGAGGGGAGGGGAGGGGQVQLVESGGGVVQPGRSLRLSCAASGFTFSYFGMHWVRQAPGKGLEWVAVIWYDGSNKYYADSVKGRFTISRDNSKNTLYLQMNSLRAEDTAVYYCARDGTIFGVLLGDYWGQGTLVTVSSASTKGPSVFPLAPSSKSTSGGTAALGCLVKDYFPEPVTVSWNSGALTSGVHTFPAVLQSSGLYSLSSVVTVPSSSLGTQTYICNVNHKPSNTKVDKKVEPKSCDKTHTCPPCPAPELLGGPSVFLFPPKPKDTLMISRTPEVTCVVVDVSHEDPEVKFNWYVDGVEVHNAKTKPCEEQYGSTYRCVSVLTVLHQDWLNGKEYKCKVSNKALPAPIEKTISKAKGQPREPQVYTLPPSREEMTKNQVSLTCLVKGFYPSDIAVEWESNGQPENNYKTTPPVLDSDGSFFLYSKLTVDKSRWQQGNVFSCSVMHEALHNHYTQKSLSLSPGK

SEQ ID NO: 3507 - protein, 501 aa, synthetic construct
  REGION 1..501: note = source = /note="Description of Artificial Sequence: Synthetic polypeptide"
HSEGTFTSDVSSYLEEQAAKEFIEWLKNGGGGGGGAGGGGAGGGGAGGGGQVQLVESGGGVVQPGRSLRLSCAASGFTFSYFGMHWVRQAPGKGLEWVAVIWYDGSNKYYADSVKGRFTISRDNSKNTLYLQMNSLRAEDTAVYYCARDGTIFGVLLGDYWGQGTLVTVSSASTKGPSVFPLAPSSKSTSGGTAALGCLVKDYFPEPVTVSWNSGALTSGVHTFPAVLQSSGLYSLSSVVTVPSSSLGTQTYICNVNHKPSNTKVDKKVEPKSCDKTHTCPPCPAPELLGGPSVFLFPPKPKDTLMISRTPEVTCVVVDVSHEDPEVKFNWYVDGVEVHNAKTKPCEEQYGSTYRCVSVLTVLHQDWLNGKEYKCKVSNKALPAPIEKTISKAKGQPREPQVYTLPPSREEMTKNQVSLTCLVKGFYPSDIAVEWESNGQPENNYKTTPPVLDSDGSFFLYSKLTVDKSRWQQGNVFSCSVMHEALHNHYTQKSLSLSPGK

SEQ ID NO: 3508 - protein, 501 aa, synthetic construct; identical to SEQ ID NO: 3507
  REGION 1..501: note = source = /note="Description of Artificial Sequence: Synthetic polypeptide"

SEQ ID NO: 3509 - protein, 501 aa, synthetic construct
  REGION 1..501: note = source = /note="Description of Artificial Sequence: Synthetic polypeptide"
HSQGTFTSDVSSYLEEQAAKEFIEWLKNGGGGGGGAGGGGAGGGGAGGGGQVQLVESGGGVVQPGRSLRLSCAASGFTFSYFGMHWVRQAPGKGLEWVAVIWYDGSNKYYADSVKGRFTISRDNSKNTLYLQMNSLRAEDTAVYYCARDGTIFGVLLGDYWGQGTLVTVSSASTKGPSVFPLAPSSKSTSGGTAALGCLVKDYFPEPVTVSWNSGALTSGVHTFPAVLQSSGLYSLSSVVTVPSSSLGTQTYICNVNHKPSNTKVDKKVEPKSCDKTHTCPPCPAPELLGGPSVFLFPPKPKDTLMISRTPEVTCVVVDVSHEDPEVKFNWYVDGVEVHNAKTKPCEEQYGSTYRCVSVLTVLHQDWLNGKEYKCKVSNKALPAPIEKTISKAKGQPREPQVYTLPPSREEMTKNQVSLTCLVKGFYPSDIAVEWESNGQPENNYKTTPPVLDSDGSFFLYSKLTVDKSRWQQGNVFSCSVMHEALHNHYTQKSLSLSPGK

SEQ ID NO: 3510 - protein, 501 aa, synthetic construct
  REGION 1..501: note = source = /note="Description of Artificial Sequence: Synthetic polypeptide"
HGDGTFTSDVSSYLEEQAAKEFIEWLKNGGGGGGGAGGGGAGGGGAGGGGQVQLVESGGGVVQPGRSLRLSCAASGFTFSYFGMHWVRQAPGKGLEWVAVIWYDGSNKYYADSVKGRFTISRDNSKNTLYLQMNSLRAEDTAVYYCARDGTIFGVLLGDYWGQGTLVTVSSASTKGPSVFPLAPSSKSTSGGTAALGCLVKDYFPEPVTVSWNSGALTSGVHTFPAVLQSSGLYSLSSVVTVPSSSLGTQTYICNVNHKPSNTKVDKKVEPKSCDKTHTCPPCPAPELLGGPSVFLFPPKPKDTLMISRTPEVTCVVVDVSHEDPEVKFNWYVDGVEVHNAKTKPCEEQYGSTYRCVSVLTVLHQDWLNGKEYKCKVSNKALPAPIEKTISKAKGQPREPQVYTLPPSREEMTKNQVSLTCLVKGFYPSDIAVEWESNGQPENNYKTTPPVLDSDGSFFLYSKLTVDKSRWQQGNVFSCSVMHEALHNHYTQKSLSLSPGK

SEQ ID NO: 3511 - protein, 501 aa, synthetic construct
  REGION 1..501: note = source = /note="Description of Artificial Sequence: Synthetic polypeptide"
HSDGTFTSDVSSYLEEQAAKEFIEWLKNGGGGGGGAGGGGAGGGGAGGGGQVQLVESGGGVVQPGRSLRLSCAASGFTFSYFGMHWVRQAPGKGLEWVAVIWYDGSNKYYADSVKGRFTISRDNSKNTLYLQMNSLRAEDTAVYYCARDGTIFGVLLGDYWGQGTLVTVSSASTKGPSVFPLAPSSKSTSGGTAALGCLVKDYFPEPVTVSWNSGALTSGVHTFPAVLQSSGLYSLSSVVTVPSSSLGTQTYICNVNHKPSNTKVDKKVEPKSCDKTHTCPPCPAPELLGGPSVFLFPPKPKDTLMISRTPEVTCVVVDVSHEDPEVKFNWYVDGVEVHNAKTKPCEEQYGSTYRCVSVLTVLHQDWLNGKEYKCKVSNKALPAPIEKTISKAKGQPREPQVYTLPPSREEMTKNQVSLTCLVKGFYPSDIAVEWESNGQPENNYKTTPPVLDSDGSFFLYSKLTVDKSRWQQGNVFSCSVMHEALHNHYTQKSLSLSPGK

SEQ ID NO: 3512 - protein, 504 aa, synthetic construct
  REGION 1..504: note = source = /note="Description of Artificial Sequence: Synthetic polypeptide"
HGEGTFTSDVSSYLEEQAAKEFIAWLVKGGGGAPAPAPAPAPAPAPAPAPAPGQVQLVESGGGVVQPGRSLRLSCAASGFTFSYFGMHWVRQAPGKGLEWVAVIWYDGSNKYYADSVKGRFTISRDNSKNTLYLQMNSLRAEDTAVYYCARDGTIFGVLLGDYWGQGTLVTVSSASTKGPSVFPLAPSSKSTSGGTAALGCLVKDYFPEPVTVSWNSGALTSGVHTFPAVLQSSGLYSLSSVVTVPSSSLGTQTYICNVNHKPSNTKVDKKVEPKSCDKTHTCPPCPAPELLGGPSVFLFPPKPKDTLMISRTPEVTCVVVDVSHEDPEVKFNWYVDGVEVHNAKTKPCEEQYGSTYRCVSVLTVLHQDWLNGKEYKCKVSNKALPAPIEKTISKAKGQPREPQVYTLPPSREEMTKNQVSLTCLVKGFYPSDIAVEWESNGQPENNYKTTPPVLDSDGSFFLYSKLTVDKSRWQQGNVFSCSVMHEALHNHYTQKSLSLSPGK

SEQ ID NO: 3513 - protein, 504 aa, synthetic construct
  REGION 1..504: note = source = /note="Description of Artificial Sequence: Synthetic polypeptide"
HSEGTFTSDVSSYLEEQAAKEFIAWLVKGGGGAPAPAPAPAPAPAPAPAPAPGQVQLVESGGGVVQPGRSLRLSCAASGFTFSYFGMHWVRQAPGKGLEWVAVIWYDGSNKYYADSVKGRFTISRDNSKNTLYLQMNSLRAEDTAVYYCARDGTIFGVLLGDYWGQGTLVTVSSASTKGPSVFPLAPSSKSTSGGTAALGCLVKDYFPEPVTVSWNSGALTSGVHTFPAVLQSSGLYSLSSVVTVPSSSLGTQTYICNVNHKPSNTKVDKKVEPKSCDKTHTCPPCPAPELLGGPSVFLFPPKPKDTLMISRTPEVTCVVVDVSHEDPEVKFNWYVDGVEVHNAKTKPCEEQYGSTYRCVSVLTVLHQDWLNGKEYKCKVSNKALPAPIEKTISKAKGQPREPQVYTLPPSREEMTKNQVSLTCLVKGFYPSDIAVEWESNGQPENNYKTTPPVLDSDGSFFLYSKLTVDKSRWQQGNVFSCSVMHEALHNHYTQKSLSLSPGK

SEQ ID NO: 3514 - protein, 504 aa, synthetic construct
  REGION 1..504: note = source = /note="Description of Artificial Sequence: Synthetic polypeptide"
HSQGTFTSDVSSYLEEQAAKEFIAWLVKGGGGAPAPAPAPAPAPAPAPAPAPGQVQLVESGGGVVQPGRSLRLSCAASGFTFSYFGMHWVRQAPGKGLEWVAVIWYDGSNKYYADSVKGRFTISRDNSKNTLYLQMNSLRAEDTAVYYCARDGTIFGVLLGDYWGQGTLVTVSSASTKGPSVFPLAPSSKSTSGGTAALGCLVKDYFPEPVTVSWNSGALTSGVHTFPAVLQSSGLYSLSSVVTVPSSSLGTQTYICNVNHKPSNTKVDKKVEPKSCDKTHTCPPCPAPELLGGPSVFLFPPKPKDTLMISRTPEVTCVVVDVSHEDPEVKFNWYVDGVEVHNAKTKPCEEQYGSTYRCVSVLTVLHQDWLNGKEYKCKVSNKALPAPIEKTISKAKGQPREPQVYTLPPSREEMTKNQVSLTCLVKGFYPSDIAVEWESNGQPENNYKTTPPVLDSDGSFFLYSKLTVDKSRWQQGNVFSCSVMHEALHNHYTQKSLSLSPGK

SEQ ID NO: 3515 - protein, 504 aa, synthetic construct
  REGION 1..504: note = source = /note="Description of Artificial Sequence: Synthetic polypeptide"
HGDGTFTSDVSSYLEEQAAKEFIAWLVKGGGGAPAPAPAPAPAPAPAPAPAPGQVQLVESGGGVVQPGRSLRLSCAASGFTFSYFGMHWVRQAPGKGLEWVAVIWYDGSNKYYADSVKGRFTISRDNSKNTLYLQMNSLRAEDTAVYYCARDGTIFGVLLGDYWGQGTLVTVSSASTKGPSVFPLAPSSKSTSGGTAALGCLVKDYFPEPVTVSWNSGALTSGVHTFPAVLQSSGLYSLSSVVTVPSSSLGTQTYICNVNHKPSNTKVDKKVEPKSCDKTHTCPPCPAPELLGGPSVFLFPPKPKDTLMISRTPEVTCVVVDVSHEDPEVKFNWYVDGVEVHNAKTKPCEEQYGSTYRCVSVLTVLHQDWLNGKEYKCKVSNKALPAPIEKTISKAKGQPREPQVYTLPPSREEMTKNQVSLTCLVKGFYPSDIAVEWESNGQPENNYKTTPPVLDSDGSFFLYSKLTVDKSRWQQGNVFSCSVMHEALHNHYTQKSLSLSPGK

SEQ ID NO: 3516 - protein, 504 aa, synthetic construct
  REGION 1..504: note = source = /note="Description of Artificial Sequence: Synthetic polypeptide"
HSDGTFTSDVSSYLEEQAAKEFIAWLVKGGGGAPAPAPAPAPAPAPAPAPAPGQVQLVESGGGVVQPGRSLRLSCAASGFTFSYFGMHWVRQAPGKGLEWVAVIWYDGSNKYYADSVKGRFTISRDNSKNTLYLQMNSLRAEDTAVYYCARDGTIFGVLLGDYWGQGTLVTVSSASTKGPSVFPLAPSSKSTSGGTAALGCLVKDYFPEPVTVSWNSGALTSGVHTFPAVLQSSGLYSLSSVVTVPSSSLGTQTYICNVNHKPSNTKVDKKVEPKSCDKTHTCPPCPAPELLGGPSVFLFPPKPKDTLMISRTPEVTCVVVDVSHEDPEVKFNWYVDGVEVHNAKTKPCEEQYGSTYRCVSVLTVLHQDWLNGKEYKCKVSNKALPAPIEKTISKAKGQPREPQVYTLPPSREEMTKNQVSLTCLVKGFYPSDIAVEWESNGQPENNYKTTPPVLDSDGSFFLYSKLTVDKSRWQQGNVFSCSVMHEALHNHYTQKSLSLSPGK

SEQ ID NO: 3517 - protein, 504 aa, synthetic construct
  REGION 1..504: note = source = /note="Description of Artificial Sequence: Synthetic polypeptide"
HGEGTFTSDVSSYLEEQAAKEFIEWLVKGGGGAPAPAPAPAPAPAPAPAPAPGQVQLVESGGGVVQPGRSLRLSCAASGFTFSYFGMHWVRQAPGKGLEWVAVIWYDGSNKYYADSVKGRFTISRDNSKNTLYLQMNSLRAEDTAVYYCARDGTIFGVLLGDYWGQGTLVTVSSASTKGPSVFPLAPSSKSTSGGTAALGCLVKDYFPEPVTVSWNSGALTSGVHTFPAVLQSSGLYSLSSVVTVPSSSLGTQTYICNVNHKPSNTKVDKKVEPKSCDKTHTCPPCPAPELLGGPSVFLFPPKPKDTLMISRTPEVTCVVVDVSHEDPEVKFNWYVDGVEVHNAKTKPCEEQYGSTYRCVSVLTVLHQDWLNGKEYKCKVSNKALPAPIEKTISKAKGQPREPQVYTLPPSREEMTKNQVSLTCLVKGFYPSDIAVEWESNGQPENNYKTTPPVLDSDGSFFLYSKLTVDKSRWQQGNVFSCSVMHEALHNHYTQKSLSLSPGK

SEQ ID NO: 3518 - protein, 504 aa, synthetic construct
  REGION 1..504: note = source = /note="Description of Artificial Sequence: Synthetic polypeptide"
HSEGTFTSDVSSYLEEQAAKEFIEWLVKGGGGAPAPAPAPAPAPAPAPAPAPGQVQLVESGGGVVQPGRSLRLSCAASGFTFSYFGMHWVRQAPGKGLEWVAVIWYDGSNKYYADSVKGRFTISRDNSKNTLYLQMNSLRAEDTAVYYCARDGTIFGVLLGDYWGQGTLVTVSSASTKGPSVFPLAPSSKSTSGGTAALGCLVKDYFPEPVTVSWNSGALTSGVHTFPAVLQSSGLYSLSSVVTVPSSSLGTQTYICNVNHKPSNTKVDKKVEPKSCDKTHTCPPCPAPELLGGPSVFLFPPKPKDTLMISRTPEVTCVVVDVSHEDPEVKFNWYVDGVEVHNAKTKPCEEQYGSTYRCVSVLTVLHQDWLNGKEYKCKVSNKALPAPIEKTISKAKGQPREPQVYTLPPSREEMTKNQVSLTCLVKGFYPSDIAVEWESNGQPENNYKTTPPVLDSDGSFFLYSKLTVDKSRWQQGNVFSCSVMHEALHNHYTQKSLSLSPGK

SEQ ID NO: 3519 - protein, 504 aa, synthetic construct
  REGION 1..504: note = source = /note="Description of Artificial Sequence: Synthetic polypeptide"
HSQGTFTSDVSSYLEEQAAKEFIEWLVKGGGGAPAPAPAPAPAPAPAPAPAPGQVQLVESGGGVVQPGRSLRLSCAASGFTFSYFGMHWVRQAPGKGLEWVAVIWYDGSNKYYADSVKGRFTISRDNSKNTLYLQMNSLRAEDTAVYYCARDGTIFGVLLGDYWGQGTLVTVSSASTKGPSVFPLAPSSKSTSGGTAALGCLVKDYFPEPVTVSWNSGALTSGVHTFPAVLQSSGLYSLSSVVTVPSSSLGTQTYICNVNHKPSNTKVDKKVEPKSCDKTHTCPPCPAPELLGGPSVFLFPPKPKDTLMISRTPEVTCVVVDVSHEDPEVKFNWYVDGVEVHNAKTKPCEEQYGSTYRCVSVLTVLHQDWLNGKEYKCKVSNKALPAPIEKTISKAKGQPREPQVYTLPPSREEMTKNQVSLTCLVKGFYPSDIAVEWESNGQPENNYKTTPPVLDSDGSFFLYSKLTVDKSRWQQGNVFSCSVMHEALHNHYTQKSLSLSPGK

SEQ ID NO: 3520 - protein, 504 aa, synthetic construct
  REGION 1..504: note = source = /note="Description of Artificial Sequence: Synthetic polypeptide"
HGDGTFTSDVSSYLEEQAAKEFIEWLVKGGGGAPAPAPAPAPAPAPAPAPAPGQVQLVESGGGVVQPGRSLRLSCAASGFTFSYFGMHWVRQAPGKGLEWVAVIWYDGSNKYYADSVKGRFTISRDNSKNTLYLQMNSLRAEDTAVYYCARDGTIFGVLLGDYWGQGTLVTVSSASTKGPSVFPLAPSSKSTSGGTAALGCLVKDYFPEPVTVSWNSGALTSGVHTFPAVLQSSGLYSLSSVVTVPSSSLGTQTYICNVNHKPSNTKVDKKVEPKSCDKTHTCPPCPAPELLGGPSVFLFPPKPKDTLMISRTPEVTCVVVDVSHEDPEVKFNWYVDGVEVHNAKTKPCEEQYGSTYRCVSVLTVLHQDWLNGKEYKCKVSNKALPAPIEKTISKAKGQPREPQVYTLPPSREEMTKNQVSLTCLVKGFYPSDIAVEWESNGQPENNYKTTPPVLDSDGSFFLYSKLTVDKSRWQQGNVFSCSVMHEALHNHYTQKSLSLSPGK

SEQ ID NO: 3521 - protein, 504 aa, synthetic construct
  REGION 1..504: note = source = /note="Description of Artificial Sequence: Synthetic polypeptide"
HSDGTFTSDVSSYLEEQAAKEFIEWLVKGGGGAPAPAPAPAPAPAPAPAPAPGQVQLVESGGGVVQPGRSLRLSCAASGFTFSYFGMHWVRQAPGKGLEWVAVIWYDGSNKYYADSVKGRFTISRDNSKNTLYLQMNSLRAEDTAVYYCARDGTIFGVLLGDYWGQGTLVTVSSASTKGPSVFPLAPSSKSTSGGTAALGCLVKDYFPEPVTVSWNSGALTSGVHTFPAVLQSSGLYSLSSVVTVPSSSLGTQTYICNVNHKPSNTKVDKKVEPKSCDKTHTCPPCPAPELLGGPSVFLFPPKPKDTLMISRTPEVTCVVVDVSHEDPEVKFNWYVDGVEVHNAKTKPCEEQYGSTYRCVSVLTVLHQDWLNGKEYKCKVSNKALPAPIEKTISKAKGQPREPQVYTLPPSREEMTKNQVSLTCLVKGFYPSDIAVEWESNGQPENNYKTTPPVLDSDGSFFLYSKLTVDKSRWQQGNVFSCSVMHEALHNHYTQKSLSLSPGK

SEQ ID NO: 3522 - protein, 504 aa, synthetic construct
  REGION 1..504: note = source = /note="Description of Artificial Sequence: Synthetic polypeptide"
HGEGTFTSDVSSYLEEQAAKEFIAWLKNGGGGAPAPAPAPAPAPAPAPAPAPGQVQLVESGGGVVQPGRSLRLSCAASGFTFSYFGMHWVRQAPGKGLEWVAVIWYDGSNKYYADSVKGRFTISRDNSKNTLYLQMNSLRAEDTAVYYCARDGTIFGVLLGDYWGQGTLVTVSSASTKGPSVFPLAPSSKSTSGGTAALGCLVKDYFPEPVTVSWNSGALTSGVHTFPAVLQSSGLYSLSSVVTVPSSSLGTQTYICNVNHKPSNTKVDKKVEPKSCDKTHTCPPCPAPELLGGPSVFLFPPKPKDTLMISRTPEVTCVVVDVSHEDPEVKFNWYVDGVEVHNAKTKPCEEQYGSTYRCVSVLTVLHQDWLNGKEYKCKVSNKALPAPIEKTISKAKGQPREPQVYTLPPSREEMTKNQVSLTCLVKGFYPSDIAVEWESNGQPENNYKTTPPVLDSDGSFFLYSKLTVDKSRWQQGNVFSCSVMHEALHNHYTQKSLSLSPGK

SEQ ID NO: 3523 - protein, 504 aa, synthetic construct
  REGION 1..504: note = source = /note="Description of Artificial Sequence: Synthetic polypeptide"
HSEGTFTSDVSSYLEEQAAKEFIAWLKNGGGGAPAPAPAPAPAPAPAPAPAPGQVQLVESGGGVVQPGRSLRLSCAASGFTFSYFGMHWVRQAPGKGLEWVAVIWYDGSNKYYADSVKGRFTISRDNSKNTLYLQMNSLRAEDTAVYYCARDGTIFGVLLGDYWGQGTLVTVSSASTKGPSVFPLAPSSKSTSGGTAALGCLVKDYFPEPVTVSWNSGALTSGVHTFPAVLQSSGLYSLSSVVTVPSSSLGTQTYICNVNHKPSNTKVDKKVEPKSCDKTHTCPPCPAPELLGGPSVFLFPPKPKDTLMISRTPEVTCVVVDVSHEDPEVKFNWYVDGVEVHNAKTKPCEEQYGSTYRCVSVLTVLHQDWLNGKEYKCKVSNKALPAPIEKTISKAKGQPREPQVYTLPPSREEMTKNQVSLTCLVKGFYPSDIAVEWESNGQPENNYKTTPPVLDSDGSFFLYSKLTVDKSRWQQGNVFSCSVMHEALHNHYTQKSLSLSPGK

SEQ ID NO: 3524 - protein, 504 aa, synthetic construct
  REGION 1..504: note = source = /note="Description of Artificial Sequence: Synthetic polypeptide"
HSQGTFTSDVSSYLEEQAAKEFIAWLKNGGGGAPAPAPAPAPAPAPAPAPAPGQVQLVESGGGVVQPGRSLRLSCAASGFTFSYFGMHWVRQAPGKGLEWVAVIWYDGSNKYYADSVKGRFTISRDNSKNTLYLQMNSLRAEDTAVYYCARDGTIFGVLLGDYWGQGTLVTVSSASTKGPSVFPLAPSSKSTSGGTAALGCLVKDYFPEPVTVSWNSGALTSGVHTFPAVLQSSGLYSLSSVVTVPSSSLGTQTYICNVNHKPSNTKVDKKVEPKSCDKTHTCPPCPAPELLGGPSVFLFPPKPKDTLMISRTPEVTCVVVDVSHEDPEVKFNWYVDGVEVHNAKTKPCEEQYGSTYRCVSVLTVLHQDWLNGKEYKCKVSNKALPAPIEKTISKAKGQPREPQVYTLPPSREEMTKNQVSLTCLVKGFYPSDIAVEWESNGQPENNYKTTPPVLDSDGSFFLYSKLTVDKSRWQQGNVFSCSVMHEALHNHYTQKSLSLSPGK

SEQ ID NO: 3525 - protein, 504 aa, synthetic construct
  REGION 1..504: note = source = /note="Description of Artificial Sequence: Synthetic polypeptide"
HGDGTFTSDVSSYLEEQAAKEFIAWLKNGGGGAPAPAPAPAPAPAPAPAPAPGQVQLVESGGGVVQPGRSLRLSCAASGFTFSYFGMHWVRQAPGKGLEWVAVIWYDGSNKYYADSVKGRFTISRDNSKNTLYLQMNSLRAEDTAVYYCARDGTIFGVLLGDYWGQGTLVTVSSASTKGPSVFPLAPSSKSTSGGTAALGCLVKDYFPEPVTVSWNSGALTSGVHTFPAVLQSSGLYSLSSVVTVPSSSLGTQTYICNVNHKPSNTKVDKKVEPKSCDKTHTCPPCPAPELLGGPSVFLFPPKPKDTLMISRTPEVTCVVVDVSHEDPEVKFNWYVDGVEVHNAKTKPCEEQYGSTYRCVSVLTVLHQDWLNGKEYKCKVSNKALPAPIEKTISKAKGQPREPQVYTLPPSREEMTKNQVSLTCLVKGFYPSDIAVEWESNGQPENNYKTTPPVLDSDGSFFLYSKLTVDKSRWQQGNVFSCSVMHEALHNHYTQKSLSLSPGK

SEQ ID NO: 3526 - protein, 504 aa, synthetic construct
  REGION 1..504: note = source = /note="Description of Artificial Sequence: Synthetic polypeptide"
HSDGTFTSDVSSYLEEQAAKEFIAWLKNGGGGAPAPAPAPAPAPAPAPAPAPGQVQLVESGGGVVQPGRSLRLSCAASGFTFSYFGMHWVRQAPGKGLEWVAVIWYDGSNKYYADSVKGRFTISRDNSKNTLYLQMNSLRAEDTAVYYCARDGTIFGVLLGDYWGQGTLVTVSSASTKGPSVFPLAPSSKSTSGGTAALGCLVKDYFPEPVTVSWNSGALTSGVHTFPAVLQSSGLYSLSSVVTVPSSSLGTQTYICNVNHKPSNTKVDKKVEPKSCDKTHTCPPCPAPELLGGPSVFLFPPKPKDTLMISRTPEVTCVVVDVSHEDPEVKFNWYVDGVEVHNAKTKPCEEQYGSTYRCVSVLTVLHQDWLNGKEYKCKVSNKALPAPIEKTISKAKGQPREPQVYTLPPSREEMTKNQVSLTCLVKGFYPSDIAVEWESNGQPENNYKTTPPVLDSDGSFFLYSKLTVDKSRWQQGNVFSCSVMHEALHNHYTQKSLSLSPGK

SEQ ID NO: 3527 - protein, 504 aa, synthetic construct
  REGION 1..504: note = source = /note="Description of Artificial Sequence: Synthetic polypeptide"
HGEGTFTSDVSSYLEEQAAKEFIEWLKNGGGGAPAPAPAPAPAPAPAPAPAPGQVQLVESGGGVVQPGRSLRLSCAASGFTFSYFGMHWVRQAPGKGLEWVAVIWYDGSNKYYADSVKGRFTISRDNSKNTLYLQMNSLRAEDTAVYYCARDGTIFGVLLGDYWGQGTLVTVSSASTKGPSVFPLAPSSKSTSGGTAALGCLVKDYFPEPVTVSWNSGALTSGVHTFPAVLQSSGLYSLSSVVTVPSSSLGTQTYICNVNHKPSNTKVDKKVEPKSCDKTHTCPPCPAPELLGGPSVFLFPPKPKDTLMISRTPEVTCVVVDVSHEDPEVKFNWYVDGVEVHNAKTKPCEEQYGSTYRCVSVLTVLHQDWLNGKEYKCKVSNKALPAPIEKTISKAKGQPREPQVYTLPPSREEMTKNQVSLTCLVKGFYPSDIAVEWESNGQPENNYKTTPPVLDSDGSFFLYSKLTVDKSRWQQGNVFSCSVMHEALHNHYTQKSLSLSPGK

SEQ ID NO: 3528 - protein, 504 aa, synthetic construct
  REGION 1..504: note = source = /note="Description of Artificial Sequence: Synthetic polypeptide"
HSEGTFTSDVSSYLEEQAAKEFIEWLKNGGGGAPAPAPAPAPAPAPAPAPAPGQVQLVESGGGVVQPGRSLRLSCAASGFTFSYFGMHWVRQAPGKGLEWVAVIWYDGSNKYYADSVKGRFTISRDNSKNTLYLQMNSLRAEDTAVYYCARDGTIFGVLLGDYWGQGTLVTVSSASTKGPSVFPLAPSSKSTSGGTAALGCLVKDYFPEPVTVSWNSGALTSGVHTFPAVLQSSGLYSLSSVVTVPSSSLGTQTYICNVNHKPSNTKVDKKVEPKSCDKTHTCPPCPAPELLGGPSVFLFPPKPKDTLMISRTPEVTCVVVDVSHEDPEVKFNWYVDGVEVHNAKTKPCEEQYGSTYRCVSVLTVLHQDWLNGKEYKCKVSNKALPAPIEKTISKAKGQPREPQVYTLPPSREEMTKNQVSLTCLVKGFYPSDIAVEWESNGQPENNYKTTPPVLDSDGSFFLYSKLTVDKSRWQQGNVFSCSVMHEALHNHYTQKSLSLSPGK

SEQ ID NO: 3529 - protein, 504 aa, synthetic construct; identical to SEQ ID NO: 3528
  REGION 1..504: note = source = /note="Description of Artificial Sequence: Synthetic polypeptide"

SEQ ID NO: 3530 - protein, 504 aa, synthetic construct
  REGION 1..504: note = source = /note="Description of Artificial Sequence: Synthetic polypeptide"
HSQGTFTSDVSSYLEEQAAKEFIEWLKNGGGGAPAPAPAPAPAPAPAPAPAPGQVQLVESGGGVVQPGRSLRLSCAASGFTFSYFGMHWVRQAPGKGLEWVAVIWYDGSNKYYADSVKGRFTISRDNSKNTLYLQMNSLRAEDTAVYYCARDGTIFGVLLGDYWGQGTLVTVSSASTKGPSVFPLAPSSKSTSGGTAALGCLVKDYFPEPVTVSWNSGALTSGVHTFPAVLQSSGLYSLSSVVTVPSSSLGTQTYICNVNHKPSNTKVDKKVEPKSCDKTHTCPPCPAPELLGGPSVFLFPPKPKDTLMISRTPEVTCVVVDVSHEDPEVKFNWYVDGVEVHNAKTKPCEEQYGSTYRCVSVLTVLHQDWLNGKEYKCKVSNKALPAPIEKTISKAKGQPREPQVYTLPPSREEMTKNQVSLTCLVKGFYPSDIAVEWESNGQPENNYKTTPPVLDSDGSFFLYSKLTVDKSRWQQGNVFSCSVMHEALHNHYTQKSLSLSPGK

SEQ ID NO: 3531 - protein, 504 aa, synthetic construct
  REGION 1..504: note = source = /note="Description of Artificial Sequence: Synthetic polypeptide"
HGDGTFTSDVSSYLEEQAAKEFIEWLKNGGGGAPAPAPAPAPAPAPAPAPAPGQVQLVESGGGVVQPGRSLRLSCAASGFTFSYFGMHWVRQAPGKGLEWVAVIWYDGSNKYYADSVKGRFTISRDNSKNTLYLQMNSLRAEDTAVYYCARDGTIFGVLLGDYWGQGTLVTVSSASTKGPSVFPLAPSSKSTSGGTAALGCLVKDYFPEPVTVSWNSGALTSGVHTFPAVLQSSGLYSLSSVVTVPSSSLGTQTYICNVNHKPSNTKVDKKVEPKSCDKTHTCPPCPAPELLGGPSVFLFPPKPKDTLMISRTPEVTCVVVDVSHEDPEVKFNWYVDGVEVHNAKTKPCEEQYGSTYRCVSVLTVLHQDWLNGKEYKCKVSNKALPAPIEKTISKAKGQPREPQVYTLPPSREEMTKNQVSLTCLVKGFYPSDIAVEWESNGQPENNYKTTPPVLDSDGSFFLYSKLTVDKSRWQQGNVFSCSVMHEALHNHYTQKSLSLSPGK

SEQ ID NO: 3532 - protein, 504 aa, synthetic construct
  REGION 1..504: note = source = /note="Description of Artificial Sequence: Synthetic polypeptide"
HSDGTFTSDVSSYLEEQAAKEFIEWLKNGGGGAPAPAPAPAPAPAPAPAPAPGQVQLVESGGGVVQPGRSLRLSCAASGFTFSYFGMHWVRQAPGKGLEWVAVIWYDGSNKYYADSVKGRFTISRDNSKNTLYLQMNSLRAEDTAVYYCARDGTIFGVLLGDYWGQGTLVTVSSASTKGPSVFPLAPSSKSTSGGTAALGCLVKDYFPEPVTVSWNSGALTSGVHTFPAVLQSSGLYSLSSVVTVPSSSLGTQTYICNVNHKPSNTKVDKKVEPKSCDKTHTCPPCPAPELLGGPSVFLFPPKPKDTLMISRTPEVTCVVVDVSHEDPEVKFNWYVDGVEVHNAKTKPCEEQYGSTYRCVSVLTVLHQDWLNGKEYKCKVSNKALPAPIEKTISKAKGQPREPQVYTLPPSREEMTKNQVSLTCLVKGFYPSDIAVEWESNGQPENNYKTTPPVLDSDGSFFLYSKLTVDKSRWQQGNVFSCSVMHEALHNHYTQKSLSLSPGK

SEQ ID NO: 3533 - protein, 504 aa, synthetic construct
  REGION 1..504: note = source = /note="Description of Artificial Sequence: Synthetic polypeptide"
HGEGTFTSDVSSYLEEQAAKEFIEWLKNGGGGSGSATGGSGSVASSGSGSATHLQVQLVESGGGVVQPGRSLRLSCAASGFTFSNYGMHWVRQAPGEGLEWVAAIWFDASDKYYADAVKGRFTISRDNSKNTLYLQMNSLRAEDTAVYYCARDQAIFGVVPDYWGQGTLVTVSSASTKGPSVFPLAPSSKSTSGGTAALGCLVKDYFPEPVTVSWNSGALTSGVHTFPAVLQSSGLYSLSSVVTVPSSSLGTQTYICNVNHKPSNTKVDKKVEPKSCDKTHTCPPCPAPELLGGPSVFLFPPKPKDTLMISRTPEVTCVVVDVSHEDPEVKFNWYVDGVEVHNAKTKPCEEQYGSTYRCVSVLTVLHQDWLNGKEYKCKVSNKALPAPIEKTISKAKGQPREPQVYTLPPSREEMTKNQVSLTCLVKGFYPSDIAVEWESNGQPENNYKTTPPVLDSDGSFFLYSKLTVDKSRWQQGNVFSCSVMHEALHNHYTQKSLSLSPGK

SEQ ID NO: 3534 - protein, 503 aa, synthetic construct
  REGION 1..503: note = source = /note="Description of Artificial Sequence: Synthetic polypeptide"
HGEGTFTSDVSSYLEEQAAKEFIEWLKNGGGGAPAPAPAPAPAPAPAPAPAPGQVQLVESGGGVVQPGRSLRLSCAASGFTFSNYGMHWVRQAPGEGLEWVAAIWFDASDKYYADAVKGRFTISRDNSKNTLYLQMNSLRAEDTAVYYCARDQAIFGVVPDYWGQGTLVTVSSASTKGPSVFPLAPSSKSTSGGTAALGCLVKDYFPEPVTVSWNSGALTSGVHTFPAVLQSSGLYSLSSVVTVPSSSLGTQTYICNVNHKPSNTKVDKKVEPKSCDKTHTCPPCPAPELLGGPSVFLFPPKPKDTLMISRTPEVTCVVVDVSHEDPEVKFNWYVDGVEVHNAKTKPCEEQYGSTYRCVSVLTVLHQDWLNGKEYKCKVSNKALPAPIEKTISKAKGQPREPQVYTLPPSREEMTKNQVSLTCLVKGFYPSDIAVEWESNGQPENNYKTTPPVLDSDGSFFLYSKLTVDKSRWQQGNVFSCSVMHEALHNHYTQKSLSLSPGK

SEQ ID NO: 3535 - protein, 500 aa, synthetic construct
  REGION 1..500: note = source = /note="Description of Artificial Sequence: Synthetic polypeptide"
HGEGTFTSDVSSYLEEQAAKEFIEWLKNGGGGGGGAGGGGAGGGGAGGGGQVQLVESGGGVVQPGRSLRLSCAASGFTFSNYGMHWVRQAPGEGLEWVAAIWFDASDKYYADAVKGRFTISRDNSKNTLYLQMNSLRAEDTAVYYCARDQAIFGVVPDYWGQGTLVTVSSASTKGPSVFPLAPSSKSTSGGTAALGCLVKDYFPEPVTVSWNSGALTSGVHTFPAVLQSSGLYSLSSVVTVPSSSLGTQTYICNVNHKPSNTKVDKKVEPKSCDKTHTCPPCPAPELLGGPSVFLFPPKPKDTLMISRTPEVTCVVVDVSHEDPEVKFNWYVDGVEVHNAKTKPCEEQYGSTYRCVSVLTVLHQDWLNGKEYKCKVSNKALPAPIEKTISKAKGQPREPQVYTLPPSREEMTKNQVSLTCLVKGFYPSDIAVEWESNGQPENNYKTTPPVLDSDGSFFLYSKLTVDKSRWQQGNVFSCSVMHEALHNHYTQKSLSLSPGK

SEQ ID NO: 3536 - protein, 512 aa, synthetic construct
  REGION 1..512: note = source = /note="Description of Artificial Sequence: Synthetic polypeptide"
HGEGTFTSDVSSYLEGEAVRLFIEWLKNGGPSSGAPPPSGSGSATGGSGSVASSGSGSATHLQVQLVESGGGVVQPGRSLRLSCAASGFTFSNYGMHWVRQAPGEGLEWVAAIWFDASDKYYADAVKGRFTISRDNSKNTLYLQMNSLRAEDTAVYYCARDQAIFGVVPDYWGQGTLVTVSSASTKGPSVFPLAPSSKSTSGGTAALGCLVKDYFPEPVTVSWNSGALTSGVHTFPAVLQSSGLYSLSSVVTVPSSSLGTQTYICNVNHKPSNTKVDKKVEPKSCDKTHTCPPCPAPELLGGPSVFLFPPKPKDTLMISRTPEVTCVVVDVSHEDPEVKFNWYVDGVEVHNAKTKPCEEQYGSTYRCVSVLTVLHQDWLNGKEYKCKVSNKALPAPIEKTISKAKGQPREPQVYTLPPSREEMTKNQVSLTCLVKGFYPSDIAVEWESNGQPENNYKTTPPVLDSDGSFFLYSKLTVDKSRWQQGNVFSCSVMHEALHNHYTQKSLSLSPGK

SEQ ID NO: 3537 - protein, 511 aa, synthetic construct
  REGION 1..511: note = source = /note="Description of Artificial Sequence: Synthetic polypeptide"
HGEGTFTSDVSSYLEGEAVRLFIEWLKNGGPSSGAPPPSGAPAPAPAPAPAPAPAPAPAPGQVQLVESGGGVVQPGRSLRLSCAASGFTFSNYGMHWVRQAPGEGLEWVAAIWFDASDKYYADAVKGRFTISRDNSKNTLYLQMNSLRAEDTAVYYCARDQAIFGVVPDYWGQGTLVTVSSASTKGPSVFPLAPSSKSTSGGTAALGCLVKDYFPEPVTVSWNSGALTSGVHTFPAVLQSSGLYSLSSVVTVPSSSLGTQTYICNVNHKPSNTKVDKKVEPKSCDKTHTCPPCPAPELLGGPSVFLFPPKPKDTLMISRTPEVTCVVVDVSHEDPEVKFNWYVDGVEVHNAKTKPCEEQYGSTYRCVSVLTVLHQDWLNGKEYKCKVSNKALPAPIEKTISKAKGQPREPQVYTLPPSREEMTKNQVSLTCLVKGFYPSDIAVEWESNGQPENNYKTTPPVLDSDGSFFLYSKLTVDKSRWQQGNVFSCSVMHEALHNHYTQKSLSLSPGK

SEQ ID NO: 3538 - protein, 508 aa, synthetic construct
  REGION 1..508: note = source = /note="Description of Artificial Sequence: Synthetic polypeptide"
HGEGTFTSDVSSYLEGEAVRLFIEWLKNGGPSSGAPPPSGGGGAGGGGAGGGGAGGGGQVQLVESGGGVVQPGRSLRLSCAASGFTFSNYGMHWVRQAPGEGLEWVAAIWFDASDKYYADAVKGRFTISRDNSKNTLYLQMNSLRAEDTAVYYCARDQAIFGVVPDYWGQGTLVTVSSASTKGPSVFPLAPSSKSTSGGTAALGCLVKDYFPEPVTVSWNSGALTSGVHTFPAVLQSSGLYSLSSVVTVPSSSLGTQTYICNVNHKPSNTKVDKKVEPKSCDKTHTCPPCPAPELLGGPSVFLFPPKPKDTLMISRTPEVTCVVVDVSHEDPEVKFNWYVDGVEVHNAKTKPCEEQYGSTYRCVSVLTVLHQDWLNGKEYKCKVSNKALPAPIEKTISKAKGQPREPQVYTLPPSREEMTKNQVSLTCLVKGFYPSDIAVEWESNGQPENNYKTTPPVLDSDGSFFLYSKLTVDKSRWQQGNVFSCSVMHEALHNHYTQKSLSLSPGK

SEQ ID NO: 3539 - protein, 268 aa, synthetic construct
  REGION 1..268: note = source = /note="Description of Artificial Sequence: Synthetic polypeptide"
HGEGTFTSDVSSYLEEQAAKEFIEWLKNGGGGSGSATGGSGSVASSGSGSATHLEIVMTQSPATLSVSPGERATLSCRASQSVSSNLAWYQQKPGQAPRLLIYGAATRATGIPARVSGSGSGTEFTLTISSLQSEDFAVYYCQQYNNWPLTFGGGTKVEIKRTVAAPSVFIFPPSDEQLKSGTASVVCLLNNFYPREAKVQWKVDNALQSGNSQESVTEQDSKDSTYSLSSTLTLSKADYEKHKVYACEVTHQGLSSPVTKSFNRGEC

SEQ ID NO: 3540 - protein, 267 aa, synthetic construct
  REGION 1..267: note = source = /note="Description of Artificial Sequence: Synthetic polypeptide"
HGEGTFTSDVSSYLEEQAAKEFIEWLKNGGGGAPAPAPAPAPAPAPAPAPAPGEIVMTQSPATLSVSPGERATLSCRASQSVSSNLAWYQQKPGQAPRLLIYGAATRATGIPARVSGSGSGTEFTLTISSLQSEDFAVYYCQQYNNWPLTFGGGTKVEIKRTVAAPSVFIFPPSDEQLKSGTASVVCLLNNFYPREAKVQWKVDNALQSGNSQESVTEQDSKDSTYSLSSTLTLSKADYEKHKVYACEVTHQGLSSPVTKSFNRGEC

SEQ ID NO: 3541 - protein, 264 aa, synthetic construct
  REGION 1..264: note = source = /note="Description of Artificial Sequence: Synthetic polypeptide"
HGEGTFTSDVSSYLEEQAAKEFIEWLKNGGGGGGGAGGGGAGGGGAGGGGEIVMTQSPATLSVSPGERATLSCRASQSVSSNLAWYQQKPGQAPRLLIYGAATRATGIPARVSGSGSGTEFTLTISSLQSEDFAVYYCQQYNNWPLTFGGGTKVEIKRTVAAPSVFIFPPSDEQLKSGTASVVCLLNNFYPREAKVQWKVDNALQSGNSQESVTEQDSKDSTYSLSSTLTLSKADYEKHKVYACEVTHQGLSSPVTKSFNRGEC

SEQ ID NO: 3542 - protein, 276 aa, synthetic construct
  REGION 1..276: note = source = /note="Description of Artificial Sequence: Synthetic polypeptide"
HGEGTFTSDVSSYLEGEAVRLFIEWLKNGGPSSGAPPPSGSGSATGGSGSVASSGSGSATHLEIVMTQSPATLSVSPGERATLSCRASQSVSSNLAWYQQKPGQAPRLLIYGAATRATGIPARVSGSGSGTEFTLTISSLQSEDFAVYYCQQYNNWPLTFGGGTKVEIKRTVAAPSVFIFPPSDEQLKSGTASVVCLLNNFYPREAKVQWKVDNALQSGNSQESVTEQDSKDSTYSLSSTLTLSKADYEKHKVYACEVTHQGLSSPVTKSFNRGEC

SEQ ID NO: 3543 - protein, 275 aa, synthetic construct
  REGION 1..275: note = source = /note="Description of Artificial Sequence: Synthetic polypeptide"
HGEGTFTSDVSSYLEGEAVRLFIEWLKNGGPSSGAPPPSGAPAPAPAPAPAPAPAPAPAPGEIVMTQSPATLSVSPGERATLSCRASQSVSSNLAWYQQKPGQAPRLLIYGAATRATGIPARVSGSGSGTEFTLTISSLQSEDFAVYYCQQYNNWPLTFGGGTKVEIKRTVAAPSVFIFPPSDEQLKSGTASVVCLLNNFYPREAKVQWKVDNALQSGNSQESVTEQDSKDSTYSLSSTLTLSKADYEKHKVYACEVTHQGLSSPVTKSFNRGEC

SEQ ID NO: 3544 - protein, 272 aa, synthetic construct
  REGION 1..272: note = source = /note="Description of Artificial Sequence: Synthetic polypeptide"
HGEGTFTSDVSSYLEGEAVRLFIEWLKNGGPSSGAPPPSGGGGAGGGGAGGGGAGGGGEIVMTQSPATLSVSPGERATLSCRASQSVSSNLAWYQQKPGQAPRLLIYGAATRATGIPARVSGSGSGTEFTLTISSLQSEDFAVYYCQQYNNWPLTFGGGTKVEIKRTVAAPSVFIFPPSDEQLKSGTASVVCLLNNFYPREAKVQWKVDNALQSGNSQESVTEQDSKDSTYSLSSTLTLSKADYEKHKVYACEVTHQGLSSPVTKSFNRGEC

SEQ ID NO: 3545 - protein, 512 aa, synthetic construct
  REGION 1..512: note = source = /note="Description of Artificial Sequence: Synthetic polypeptide"
HGEGTFTSDVSSYLEEQAAKEFIEWLKNGGGGSGSATGGSGSVASSGSGSATHLQMQVVQSGAEVKKPGASVKVSCKASGYTFTGYYMHWVRQAPGQGLEWMGWINPNSGGTNYAQKFQGRVTMTRDTSISTAYMELSSLRSDDTAVYYCARGGDYVFGTYRPHYYYGMDVWGQGTTVTVSSASTKGPSVFPLAPSSKSTSGGTAALGCLVKDYFPEPVTVSWNSGALTSGVHTFPAVLQSSGLYSLSSVVTVPSSSLGTQTYICNVNHKPSNTKVDKKVEPKSCDKTHTCPPCPAPELLGGPSVFLFPPKPKDTLMISRTPEVTCVVVDVSHEDPEVKFNWYVDGVEVHNAKTKPCEEQYGSTYRCVSVLTVLHQDWLNGKEYKCKVSNKALPAPIEKTISKAKGQPREPQVYTLPPSREEMTKNQVSLTCLVKGFYPSDIAVEWESNGQPENNYKTTPPVLDSDGSFFLYSKLTVDKSRWQQGNVFSCSVMHEALHNHYTQKSLSLSPGK

SEQ ID NO: 3546 - protein, 270 aa, synthetic construct
  REGION 1..270: note = source = /note="Description of Artificial Sequence: Synthetic polypeptide"
HGEGTFTSDVSSYLEEQAAKEFIEWLKNGGGGSGSATGGSGSVASSGSGSATHLQSVLTQPPSASGTPGQRVTISCSGSSSNIGSNYVNWYQHLPGTAPKLLIYTNNQRPSGVPDRFSGSKSGTSASLAISGLQSEDEADYFCATFDSSLNAPVFGGGTKLTVLGQPKAAPSVTLFPPSSEELQANKATLVCLISDFYPGAVTVAWKADSSPVKAGVETTTPSKQSNNKYAASSYLSLTPEQWKSHRSYSCQVTHEGSTVEKTVAPTECS

SEQ ID NO: 3547 - protein, 511 aa, synthetic construct
  REGION 1..511: note = source = /note="Description of Artificial Sequence: Synthetic polypeptide"
HGEGTFTSDVSSYLEEQAAKEFIEWLKNGGGGAPAPAPAPAPAPAPAPAPAPGQMQVVQSGAEVKKPGASVKVSCKASGYTFTGYYMHWVRQAPGQGLEWMGWINPNSGGTNYAQKFQGRVTMTRDTSISTAYMELSSLRSDDTAVYYCARGGDYVFGTYRPHYYYGMDVWGQGTTVTVSSASTKGPSVFPLAPSSKSTSGGTAALGCLVKDYFPEPVTVSWNSGALTSGVHTFPAVLQSSGLYSLSSVVTVPSSSLGTQTYICNVNHKPSNTKVDKKVEPKSCDKTHTCPPCPAPELLGGPSVFLFPPKPKDTLMISRTPEVTCVVVDVSHEDPEVKFNWYVDGVEVHNAKTKPCEEQYGSTYRCVSVLTVLHQDWLNGKEYKCKVSNKALPAPIEKTISKAKGQPREPQVYTLPPSREEMTKNQVSLTCLVKGFYPSDIAVEWESNGQPENNYKTTPPVLDSDGSFFLYSKLTVDKSRWQQGNVFSCSVMHEALHNHYTQKSLSLSPGK

SEQ ID NO: 3548 - protein, 269 aa, synthetic construct
  REGION 1..269: note = source = /note="Description of Artificial Sequence: Synthetic polypeptide"
HGEGTFTSDVSSYLEEQAAKEFIEWLKNGGGGAPAPAPAPAPAPAPAPAPAPGQSVLTQPPSASGTPGQRVTISCSGSSSNIGSNYVNWYQHLPGTAPKLLIYTNNQRPSGVPDRFSGSKSGTSASLAISGLQSEDEADYFCATFDSSLNAPVFGGGTKLTVLGQPKAAPSVTLFPPSSEELQANKATLVCLISDFYPGAVTVAWKADSSPVKAGVETTTPSKQSNNKYAASSYLSLTPEQWKSHRSYSCQVTHEGSTVEKTVAPTECS

SEQ ID NO: 3549 - protein, 508 aa, synthetic construct
  REGION 1..508: note = source = /note="Description of Artificial Sequence: Synthetic polypeptide"
HGEGTFTSDVSSYLEEQAAKEFIEWLKNGGGGGGGAGGGGAGGGGAGGGGQMQVVQSGAEVKKPGASVKVSCKASGYTFTGYYMHWVRQAPGQGLEWMGWINPNSGGTNYAQKFQGRVTMTRDTSISTAYMELSSLRSDDTAVYYCARGGDYVFGTYRPHYYYGMDVWGQGTTVTVSSASTKGPSVFPLAPSSKSTSGGTAALGCLVKDYFPEPVTVSWNSGALTSGVHTFPAVLQSSGLYSLSSVVTVPSSSLGTQTYICNVNHKPSNTKVDKKVEPKSCDKTHTCPPCPAPELLGGPSVFLFPPKPKDTLMISRTPEVTCVVVDVSHEDPEVKFNWYVDGVEVHNAKTKPCEEQYGSTYRCVSVLTVLHQDWLNGKEYKCKVSNKALPAPIEKTISKAKGQPREPQVYTLPPSREEMTKNQVSLTCLVKGFYPSDIAVEWESNGQPENNYKTTPPVLDSDGSFFLYSKLTVDKSRWQQGNVFSCSVMHEALHNHYTQKSLSLSPGK

SEQ ID NO: 3550 - protein, 266 aa, synthetic construct
  REGION 1..266: note = source = /note="Description of Artificial Sequence: Synthetic polypeptide"
HGEGTFTSDVSSYLEEQAAKEFIEWLKNGGGGGGGAGGGGAGGGGAGGGGQSVLTQPPSASGTPGQRVTISCSGSSSNIGSNYVNWYQHLPGTAPKLLIYTNNQRPSGVPDRFSGSKSGTSASLAISGLQSEDEADYFCATFDSSLNAPVFGGGTKLTVLGQPKAAPSVTLFPPSSEELQANKATLVCLISDFYPGAVTVAWKADSSPVKAGVETTTPSKQSNNKYAASSYLSLTPEQWKSHRSYSCQVTHEGSTVEKTVAPTECS

SEQ ID NO: 3551 - protein, 520 aa, synthetic construct
  REGION 1..520: note = source = /note="Description of Artificial Sequence: Synthetic polypeptide"
HGEGTFTSDVSSYLEGEAVRLFIEWLKNGGPSSGAPPPSGSGSATGGSGSVASSGSGSATHLQMQVVQSGAEVKKPGASVKVSCKASGYTFTGYYMHWVRQAPGQGLEWMGWINPNSGGTNYAQKFQGRVTMTRDTSISTAYMELSSLRSDDTAVYYCARGGDYVFGTYRPHYYYGMDVWGQGTTVTVSSASTKGPSVFPLAPSSKSTSGGTAALGCLVKDYFPEPVTVSWNSGALTSGVHTFPAVLQSSGLYSLSSVVTVPSSSLGTQTYICNVNHKPSNTKVDKKVEPKSCDKTHTCPPCPAPELLGGPSVFLFPPKPKDTLMISRTPEVTCVVVDVSHEDPEVKFNWYVDGVEVHNAKTKPCEEQYGSTYRCVSVLTVLHQDWLNGKEYKCKVSNKALPAPIEKTISKAKGQPREPQVYTLPPSREEMTKNQVSLTCLVKGFYPSDIAVEWESNGQPENNYKTTPPVLDSDGSFFLYSKLTVDKSRWQQGNVFSCSVMHEALHNHYTQKSLSLSPGK

SEQ ID NO: 3552 - protein, 278 aa, synthetic construct
  REGION 1..278: note = source = /note="Description of Artificial Sequence: Synthetic polypeptide"
HGEGTFTSDVSSYLEGEAVRLFIEWLKNGGPSSGAPPPSGSGSATGGSGSVASSGSGSATHLQSVLTQPPSASGTPGQRVTISCSGSSSNIGSNYVNWYQHLPGTAPKLLIYTNNQRPSGVPDRFSGSKSGTSASLAISGLQSEDEADYFCATFDSSLNAPVFGGGTKLTVLGQPKAAPSVTLFPPSSEELQANKATLVCLISDFYPGAVTVAWKADSSPVKAGVETTTPSKQSNNKYAASSYLSLTPEQWKSHRSYSCQVTHEGSTVEKTVAPTECS

SEQ ID NO: 3553 - protein, 519 aa, synthetic construct
  REGION 1..519: note = source = /note="Description of Artificial Sequence: Synthetic polypeptide"
HGEGTFTSDVSSYLEGEAVRLFIEWLKNGGPSSGAPPPSGAPAPAPAPAPAPAPAPAPAPGQMQVVQSGAEVKKPGASVKVSCKASGYTFTGYYMHWVRQAPGQGLEWMGWINPNSGGTNYAQKFQGRVTMTRDTSISTAYMELSSLRSDDTAVYYCARGGDYVFGTYRPHYYYGMDVWGQGTTVTVSSASTKGPSVFPLAPSSKSTSGGTAALGCLVKDYFPEPVTVSWNSGALTSGVHTFPAVLQSSGLYSLSSVVTVPSSSLGTQTYICNVNHKPSNTKVDKKVEPKSCDKTHTCPPCPAPELLGGPSVFLFPPKPKDTLMISRTPEVTCVVVDVSHEDPEVKFNWYVDGVEVHNAKTKPCEEQYGSTYRCVSVLTVLHQDWLNGKEYKCKVSNKALPAPIEKTISKAKGQPREPQVYTLPPSREEMTKNQVSLTCLVKGFYPSDIAVEWESNGQPENNYKTTPPVLDSDGSFFLYSKLTVDKSRWQQGNVFSCSVMHEALHNHYTQKSLSLSPGK

SEQ ID NO: 3554 - protein, 277 aa, synthetic construct
  REGION 1..277: note = source = /note="Description of Artificial Sequence: Synthetic polypeptide"
HGEGTFTSDVSSYLEGEAVRLFIEWLKNGGPSSGAPPPSGAPAPAPAPAPAPAPAPAPAPGQSVLTQPPSASGTPGQRVTISCSGSSSNIGSNYVNWYQHLPGTAPKLLIYTNNQRPSGVPDRFSGSKSGTSASLAISGLQSEDEADYFCATFDSSLNAPVFGGGTKLTVLGQPKAAPSVTLFPPSSEELQANKATLVCLISDFYPGAVTVAWKADSSPVKAGVETTTPSKQSNNKYAASSYLSLTPEQWKSHRSYSCQVTHEGSTVEKTVAPTECS

SEQ ID NO: 3555 - protein, 516 aa, synthetic construct
  REGION 1..516: note = source = /note="Description of Artificial Sequence: Synthetic polypeptide"
HGEGTFTSDVSSYLEGEAVRLFIEWLKNGGPSSGAPPPSGGGGAGGGGAGGGGAGGGGQMQVVQSGAEVKKPGASVKVSCKASGYTFTGYYMHWVRQAPGQGLEWMGWINPNSGGTNYAQKFQGRVTMTRDTSISTAYMELSSLRSDDTAVYYCARGGDYVFGTYRPHYYYGMDVWGQGTTVTVSSASTKGPSVFPLAPSSKSTSGGTAALGCLVKDYFPEPVTVSWNSGALTSGVHTFPAVLQSSGLYSLSSVVTVPSSSLGTQTYICNVNHKPSNTKVDKKVEPKSCDKTHTCPPCPAPELLGGPSVFLFPPKPKDTLMISRTPEVTCVVVDVSHEDPEVKFNWYVDGVEVHNAKTKPCEEQYGSTYRCVSVLTVLHQDWLNGKEYKCKVSNKALPAPIEKTISKAKGQPREPQVYTLPPSREEMTKNQVSLTCLVKGFYPSDIAVEWESNGQPENNYKTTPPVLDSDGSFFLYSKLTVDKSRWQQGNVFSCSVMHEALHNHYTQKSLSLSPGK

SEQ ID NO: 3556 - protein, 274 aa, synthetic construct
  REGION 1..274: note = source = /note="Description of Artificial Sequence: Synthetic polypeptide"
HGEGTFTSDVSSYLEGEAVRLFIEWLKNGGPSSGAPPPSGGGGAGGGGAGGGGAGGGGQSVLTQPPSASGTPGQRVTISCSGSSSNIGSNYVNWYQHLPGTAPKLLIYTNNQRPSGVPDRFSGSKSGTSASLAISGLQSEDEADYFCATFDSSLNAPVFGGGTKLTVLGQPKAAPSVTLFPPSSEELQANKATLVCLISDFYPGAVTVAWKADSSPVKAGVETTTPSKQSNNKYAASSYLSLTPEQWKSHRSYSCQVTHEGSTVEKTVAPTECS

SEQ ID NO: 3557 - protein, 505 aa, synthetic construct
  REGION 1..505: note = source = /note="Description of Artificial Sequence: Synthetic polypeptide"
HGEGTFTSDVSSYLEEQAAKEFIEWLKNGGGGSGSATGGSGSVASSGSGSATHLQVQLVESGGGVVQPGRSLRLSCTASGFTFSSYGIHWVRQAPGKGLEWVAVIWYDGSNKFHADSVKGRFTISRDNSKNTLYLQMNSLRAEDSAMYFCARGKVAGMPEAFEIWGQGTKVTVSSASTKGPSVFPLAPSSKSTSGGTAALGCLVKDYFPEPVTVSWNSGALTSGVHTFPAVLQSSGLYSLSSVVTVPSSSLGTQTYICNVNHKPSNTKVDKKVEPKSCDKTHTCPPCPAPELLGGPSVFLFPPKPKDTLMISRTPEVTCVVVDVSHEDPEVKFNWYVDGVEVHNAKTKPCEEQYGSTYRCVSVLTVLHQDWLNGKEYKCKVSNKALPAPIEKTISKAKGQPREPQVYTLPPSREEMTKNQVSLTCLVKGFYPSDIAVEWESNGQPENNYKTTPPVLDSDGSFFLYSKLTVDKSRWQQGNVFSCSVMHEALHNHYTQKSLSLSPGK

SEQ ID NO: 3558 - protein, 268 aa, synthetic construct
  REGION 1..268: note = source = /note="Description of Artificial Sequence: Synthetic polypeptide"
HGEGTFTSDVSSYLEEQAAKEFIEWLKNGGGGSGSATGGSGSVASSGSGSATHLDIQLTQSPSSLSASVGDRVTITCRASQTISRFLNWYQQKPGKAPELLIYVASSLQSGVPSRFSGSGSGTDFTLTISSLQPEDFATYYCQQSYSTLISFGQGTKLEITRTVAAPSVFIFPPSDEQLKSGTASVVCLLNNFYPREAKVQWKVDNALQSGNSQESVTEQDSKDSTYSLSSTLTLSKADYEKHKVYACEVTHQGLSSPVTKSFNRGEC

SEQ ID NO: 3559 - protein, 504 aa, synthetic construct
  REGION 1..504: note = source = /note="Description of Artificial Sequence: Synthetic polypeptide"
HGEGTFTSDVSSYLEEQAAKEFIEWLKNGGGGAPAPAPAPAPAPAPAPAPAPGQVQLVESGGGVVQPGRSLRLSCTASGFTFSSYGIHWVRQAPGKGLEWVAVIWYDGSNKFHADSVKGRFTISRDNSKNTLYLQMNSLRAEDSAMYFCARGKVAGMPEAFEIWGQGTKVTVSSASTKGPSVFPLAPSSKSTSGGTAALGCLVKDYFPEPVTVSWNSGALTSGVHTFPAVLQSSGLYSLSSVVTVPSSSLGTQTYICNVNHKPSNTKVDKKVEPKSCDKTHTCPPCPAPELLGGPSVFLFPPKPKDTLMISRTPEVTCVVVDVSHEDPEVKFNWYVDGVEVHNAKTKPCEEQYGSTYRCVSVLTVLHQDWLNGKEYKCKVSNKALPAPIEKTISKAKGQPREPQVYTLPPSREEMTKNQVSLTCLVKGFYPSDIAVEWESNGQPENNYKTTPPVLDSDGSFFLYSKLTVDKSRWQQGNVFSCSVMHEALHNHYTQKSLSLSPGK

SEQ ID NO: 3560 - protein, 267 aa, synthetic construct
  REGION 1..267: note = source = /note="Description of Artificial Sequence: Synthetic polypeptide"
HGEGTFTSDVSSYLEEQAAKEFIEWLKNGGGGAPAPAPAPAPAPAPAPAPAPGDIQLTQSPSSLSASVGDRVTITCRASQTISRFLNWYQQKPGKAPELLIYVASSLQSGVPSRFSGSGSGTDFTLTISSLQPEDFATYYCQQSYSTLISFGQGTKLEITRTVAAPSVFIFPPSDEQLKSGTASVVCLLNNFYPREAKVQWKVDNALQSGNSQESVTEQDSKDSTYSLSSTLTLSKADYEKHKVYACEVTHQGLSSPVTKSFNRGEC

SEQ ID NO: 3561 - protein, 501 aa, synthetic construct
  REGION 1..501: note = source = /note="Description of Artificial Sequence: Synthetic polypeptide"
HGEGTFTSDVSSYLEEQAAKEFIEWLKNGGGGGGGAGGGGAGGGGAGGGGQVQLVESGGGVVQPGRSLRLSCTASGFTFSSYGIHWVRQAPGKGLEWVAVIWYDGSNKFHADSVKGRFTISRDNSKNTLYLQMNSLRAEDSAMYFCARGKVAGMPEAFEIWGQGTKVTVSSASTKGPSVFPLAPSSKSTSGGTAALGCLVKDYFPEPVTVSWNSGALTSGVHTFPAVLQSSGLYSLSSVVTVPSSSLGTQTYICNVNHKPSNTKVDKKVEPKSCDKTHTCPPCPAPELLGGPSVFLFPPKPKDTLMISRTPEVTCVVVDVSHEDPEVKFNWYVDGVEVHNAKTKPCEEQYGSTYRCVSVLTVLHQDWLNGKEYKCKVSNKALPAPIEKTISKAKGQPREPQVYTLPPSREEMTKNQVSLTCLVKGFYPSDIAVEWESNGQPENNYKTTPPVLDSDGSFFLYSKLTVDKSRWQQGNVFSCSVMHEALHNHYTQKSLSLSPGK

SEQ ID NO: 3562 - protein, 264 aa, synthetic construct
  REGION 1..264: note = source = /note="Description of Artificial Sequence: Synthetic polypeptide"
HGEGTFTSDVSSYLEEQAAKEFIEWLKNGGGGGGGAGGGGAGGGGAGGGGDIQLTQSPSSLSASVGDRVTITCRASQTISRFLNWYQQKPGKAPELLIYVASSLQSGVPSRFSGSGSGTDFTLTISSLQPEDFATYYCQQSYSTLISFGQGTKLEITRTVAAPSVFIFPPSDEQLKSGTASVVCLLNNFYPREAKVQWKVDNALQSGNSQESVTEQDSKDSTYSLSSTLTLSKADYEKHKVYACEVTHQGLSSPVTKSFNRGEC

SEQ ID NO: 3563 - protein, 513 aa, synthetic construct
  REGION 1..513: note = source = /note="Description of Artificial Sequence: Synthetic polypeptide"
HGEGTFTSDVSSYLEGEAVRLFIEWLKNGGPSSGAPPPSGSGSATGGSGSVASSGSGSATHLQVQLVESGGGVVQPGRSLRLSCTASGFTFSSYGIHWVRQAPGKGLEWVAVIWYDGSNKFHADSVKGRFTISRDNSKNTLYLQMNSLRAEDSAMYFCARGKVAGMPEAFEIWGQGTKVTVSSASTKGPSVFPLAPSSKSTSGGTAALGCLVKDYFPEPVTVSWNSGALTSGVHTFPAVLQSSGLYSLSSVVTVPSSSLGTQTYICNVNHKPSNTKVDKKVEPKSCDKTHTCPPCPAPELLGGPSVFLFPPKPKDTLMISRTPEVTCVVVDVSHEDPEVKFNWYVDGVEVHNAKTKPCEEQYGSTYRCVSVLTVLHQDWLNGKEYKCKVSNKALPAPIEKTISKAKGQPREPQVYTLPPSREEMTKNQVSLTCLVKGFYPSDIAVEWESNGQPENNYKTTPPVLDSDGSFFLYSKLTVDKSRWQQGNVFSCSVMHEALHNHYTQKSLSLSPGK

SEQ ID NO: 3564 - protein, 276 aa, synthetic construct
  REGION 1..276: note = source = /note="Description of Artificial Sequence: Synthetic polypeptide"
HGEGTFTSDVSSYLEGEAVRLFIEWLKNGGPSSGAPPPSGSGSATGGSGSVASSGSGSATHLDIQLTQSPSSLSASVGDRVTITCRASQTISRFLNWYQQKPGKAPELLIYVASSLQSGVPSRFSGSGSGTDFTLTISSLQPEDFATYYCQQSYSTLISFGQGTKLEITRTVAAPSVFIFPPSDEQLKSGTASVVCLLNNFYPREAKVQWKVDNALQSGNSQESVTEQDSKDSTYSLSSTLTLSKADYEKHKVYACEVTHQGLSSPVTKSFNRGEC

SEQ ID NO: 3565 - protein, 512 aa, synthetic construct
  REGION 1..512: note = source = /note="Description of Artificial Sequence: Synthetic polypeptide"
HGEGTFTSDVSSYLEGEAVRLFIEWLKNGGPSSGAPPPSGAPAPAPAPAPAPAPAPAPAPGQVQLVESGGGVVQPGRSLRLSCTASGFTFSSYGIHWVRQAPGKGLEWVAVIWYDGSNKFHADSVKGRFTISRDNSKNTLYLQMNSLRAEDSAMYFCARGKVAGMPEAFEIWGQGTKVTVSSASTKGPSVFPLAPSSKSTSGGTAALGCLVKDYFPEPVTVSWNSGALTSGVHTFPAVLQSSGLYSLSSVVTVPSSSLGTQTYICNVNHKPSNTKVDKKVEPKSCDKTHTCPPCPAPELLGGPSVFLFPPKPKDTLMISRTPEVTCVVVDVSHEDPEVKFNWYVDGVEVHNAKTKPCEEQYGSTYRCVSVLTVLHQDWLNGKEYKCKVSNKALPAPIEKTISKAKGQPREPQVYTLPPSREEMTKNQVSLTCLVKGFYPSDIAVEWESNGQPENNYKTTPPVLDSDGSFFLYSKLTVDKSRWQQGNVFSCSVMHEALHNHYTQKSLSLSPGK

SEQ ID NO: 3566 - protein, 275 aa, synthetic construct
  REGION 1..275: note = source = /note="Description of Artificial Sequence: Synthetic polypeptide"
HGEGTFTSDVSSYLEGEAVRLFIEWLKNGGPSSGAPPPSGAPAPAPAPAPAPAPAPAPAPGDIQLTQSPSSLSASVGDRVTITCRASQTISRFLNWYQQKPGKAPELLIYVASSLQSGVPSRFSGSGSGTDFTLTISSLQPEDFATYYCQQSYSTLISFGQGTKLEITRTVAAPSVFIFPPSDEQLKSGTASVVCLLNNFYPREAKVQWKVDNALQSGNSQESVTEQDSKDSTYSLSSTLTLSKADYEKHKVYACEVTHQGLSSPVTKSFNRGEC

SEQ ID NO: 3567 - protein, 509 aa, synthetic construct
  REGION 1..509: note = source = /note="Description of Artificial Sequence: Synthetic polypeptide"
HGEGTFTSDVSSYLEGEAVRLFIEWLKNGGPSSGAPPPSGGGGAGGGGAGGGGAGGGGQVQLVESGGGVVQPGRSLRLSCTASGFTFSSYGIHWVRQAPGKGLEWVAVIWYDGSNKFHADSVKGRFTISRDNSKNTLYLQMNSLRAEDSAMYFCARGKVAGMPEAFEIWGQGTKVTVSSASTKGPSVFPLAPSSKSTSGGTAALGCLVKDYFPEPVTVSWNSGALTSGVHTFPAVLQSSGLYSLSSVVTVPSSSLGTQTYICNVNHKPSNTKVDKKVEPKSCDKTHTCPPCPAPELLGGPSVFLFPPKPKDTLMISRTPEVTCVVVDVSHEDPEVKFNWYVDGVEVHNAKTKPCEEQYGSTYRCVSVLTVLHQDWLNGKEYKCKVSNKALPAPIEKTISKAKGQPREPQVYTLPPSREEMTKNQVSLTCLVKGFYPSDIAVEWESNGQPENNYKTTPPVLDSDGSFFLYSKLTVDKSRWQQGNVFSCSVMHEALHNHYTQKSLSLSPGK

SEQ ID NO: 3568 - protein, 272 aa, synthetic construct
  REGION 1..272: note = source = /note="Description of Artificial Sequence: Synthetic polypeptide"
HGEGTFTSDVSSYLEGEAVRLFIEWLKNGGPSSGAPPPSGGGGAGGGGAGGGGAGGGGDIQLTQSPSSLSASVGDRVTITCRASQTISRFLNWYQQKPGKAPELLIYVASSLQSGVPSRFSGSGSGTDFTLTISSLQPEDFATYYCQQSYSTLISFGQGTKLEITRTVAAPSVFIFPPSDEQLKSGTASVVCLLNNFYPREAKVQWKVDNALQSGNSQESVTEQDSKDSTYSLSSTLTLSKADYEKHKVYACEVTHQGLSSPVTKSFNRGEC

SEQ ID NO: 3569 - protein, 504 aa, synthetic construct
  REGION 1..504: note = source = /note="Description of Artificial Sequence: Synthetic polypeptide"
HGEGTFTSDVSSYLEEQAAKEFIEWLVKGGGGSGSATGGSGSVASSGSGSATHLQVQLVESGGGVVQPGRSLRLSCAASGFTFSNYGMHWVRQAPGEGLEWVAAIWFDASDKYYADAVKGRFTISRDNSKNTLYLQMNSLRAEDTAVYYCARDQAIFGVVPDYWGQGTLVTVSSASTKGPSVFPLAPSSKSTSGGTAALGCLVKDYFPEPVTVSWNSGALTSGVHTFPAVLQSSGLYSLSSVVTVPSSSLGTQTYICNVNHKPSNTKVDKKVEPKSCDKTHTCPPCPAPELLGGPSVFLFPPKPKDTLMISRTPEVTCVVVDVSHEDPEVKFNWYVDGVEVHNAKTKPCEEQYGSTYRCVSVLTVLHQDWLNGKEYKCKVSNKALPAPIEKTISKAKGQPREPQVYTLPPSREEMTKNQVSLTCLVKGFYPSDIAVEWESNGQPENNYKTTPPVLDSDGSFFLYSKLTVDKSRWQQGNVFSCSVMHEALHNHYTQKSLSLSPGK

SEQ ID NO: 3570 - protein, 268 aa, synthetic construct
  REGION 1..268: note = source = /note="Description of Artificial Sequence: Synthetic polypeptide"
HGEGTFTSDVSSYLEEQAAKEFIEWLVKGGGGSGSATGGSGSVASSGSGSATHLEIVMTQSPATLSVSPGERATLSCRASQSVSSNLAWYQQKPGQAPRLLIYGAATRATGIPARVSGSGSGTEFTLTISSLQSEDFAVYYCQQYNNWPLTFGGGTKVEIKRTVAAPSVFIFPPSDEQLKSGTASVVCLLNNFYPREAKVQWKVDNALQSGNSQESVTEQDSKDSTYSLSSTLTLSKADYEKHKVYACEVTHQGLSSPVTKSFNRGEC

SEQ ID NO: 3571 - protein, 500 aa, synthetic construct
  REGION 1..500: note = source = /note="Description of Artificial Sequence: Synthetic polypeptide"
HGEGTFTSDVSSYLEEQAAKEFIEWLVKGGGGGGGAGGGGAGGGGAGGGGQVQLVESGGGVVQPGRSLRLSCAASGFTFSNYGMHWVRQAPGEGLEWVAAIWFDASDKYYADAVKGRFTISRDNSKNTLYLQMNSLRAEDTAVYYCARDQAIFGVVPDYWGQGTLVTVSSASTKGPSVFPLAPSSKSTSGGTAALGCLVKDYFPEPVTVSWNSGALTSGVHTFPAVLQSSGLYSLSSVVTVPSSSLGTQTYICNVNHKPSNTKVDKKVEPKSCDKTHTCPPCPAPELLGGPSVFLFPPKPKDTLMISRTPEVTCVVVDVSHEDPEVKFNWYVDGVEVHNAKTKPCEEQYGSTYRCVSVLTVLHQDWLNGKEYKCKVSNKALPAPIEKTISKAKGQPREPQVYTLPPSREEMTKNQVSLTCLVKGFYPSDIAVEWESNGQPENNYKTTPPVLDSDGSFFLYSKLTVDKSRWQQGNVFSCSVMHEALHNHYTQKSLSLSPGK

SEQ ID NO: 3572 - protein, 264 aa, synthetic construct
  REGION 1..264: note = source = /note="Description of Artificial Sequence: Synthetic polypeptide"
HGEGTFTSDVSSYLEEQAAKEFIEWLVKGGGGGGGAGGGGAGGGGAGGGGEIVMTQSPATLSVSPGERATLSCRASQSVSSNLAWYQQKPGQAPRLLIYGAATRATGIPARVSGSGSGTEFTLTISSLQSEDFAVYYCQQYNNWPLTFGGGTKVEIKRTVAAPSVFIFPPSDEQLKSGTASVVCLLNNFYPREAKVQWKVDNALQSGNSQESVTEQDSKDSTYSLSSTLTLSKADYEKHKVYACEVTHQGLSSPVTKSFNRGEC

SEQ ID NO: 3573 - protein, 504 aa, synthetic construct
  REGION 1..504: note = source = /note="Description of Artificial Sequence: Synthetic polypeptide"
HGEGTFTSDYSSYLEEQAAKEFIEWLKNGGGGSGSATGGSGSVASSGSGSATHLQVQLVESGGGVVQPGRSLRLSCAASGFTFSNYGMHWVRQAPGEGLEWVAAIWFDASDKYYADAVKGRFTISRDNSKNTLYLQMNSLRAEDTAVYYCARDQAIFGVVPDYWGQGTLVTVSSASTKGPSVFPLAPSSKSTSGGTAALGCLVKDYFPEPVTVSWNSGALTSGVHTFPAVLQSSGLYSLSSVVTVPSSSLGTQTYICNVNHKPSNTKVDKKVEPKSCDKTHTCPPCPAPELLGGPSVFLFPPKPKDTLMISRTPEVTCVVVDVSHEDPEVKFNWYVDGVEVHNAKTKPCEEQYGSTYRCVSVLTVLHQDWLNGKEYKCKVSNKALPAPIEKTISKAKGQPREPQVYTLPPSREEMTKNQVSLTCLVKGFYPSDIAVEWESNGQPENNYKTTPPVLDSDGSFFLYSKLTVDKSRWQQGNVFSCSVMHEALHNHYTQKSLSLSPGK

SEQ ID NO: 3574 - protein, 268 aa, synthetic construct
  REGION 1..268: note = source = /note="Description of Artificial Sequence: Synthetic polypeptide"
HGEGTFTSDYSSYLEEQAAKEFIEWLKNGGGGSGSATGGSGSVASSGSGSATHLEIVMTQSPATLSVSPGERATLSCRASQSVSSNLAWYQQKPGQAPRLLIYGAATRATGIPARVSGSGSGTEFTLTISSLQSEDFAVYYCQQYNNWPLTFGGGTKVEIKRTVAAPSVFIFPPSDEQLKSGTASVVCLLNNFYPREAKVQWKVDNALQSGNSQESVTEQDSKDSTYSLSSTLTLSKADYEKHKVYACEVTHQGLSSPVTKSFNRGEC

SEQ ID NO: 3575 - protein, 503 aa, synthetic construct
  REGION 1..503: note = source = /note="Description of Artificial Sequence: Synthetic polypeptide"
HGEGTFTSDYSSYLEEQAAKEFIEWLKNGGGGAPAPAPAPAPAPAPAPAPAPGQVQLVESGGGVVQPGRSLRLSCAASGFTFSNYGMHWVRQAPGEGLEWVAAIWFDASDKYYADAVKGRFTISRDNSKNTLYLQMNSLRAEDTAVYYCARDQAIFGVVPDYWGQGTLVTVSSASTKGPSVFPLAPSSKSTSGGTAALGCLVKDYFPEPVTVSWNSGALTSGVHTFPAVLQSSGLYSLSSVVTVPSSSLGTQTYICNVNHKPSNTKVDKKVEPKSCDKTHTCPPCPAPELLGGPSVFLFPPKPKDTLMISRTPEVTCVVVDVSHEDPEVKFNWYVDGVEVHNAKTKPCEEQYGSTYRCVSVLTVLHQDWLNGKEYKCKVSNKALPAPIEKTISKAKGQPREPQVYTLPPSREEMTKNQVSLTCLVKGFYPSDIAVEWESNGQPENNYKTTPPVLDSDGSFFLYSKLTVDKSRWQQGNVFSCSVMHEALHNHYTQKSLSLSPGK

SEQ ID NO: 3576 - protein, 267 aa, synthetic construct
  REGION 1..267: note = source = /note="Description of Artificial Sequence: Synthetic polypeptide"
HGEGTFTSDYSSYLEEQAAKEFIEWLKNGGGGAPAPAPAPAPAPAPAPAPAPGEIVMTQSPATLSVSPGERATLSCRASQSVSSNLAWYQQKPGQAPRLLIYGAATRATGIPARVSGSGSGTEFTLTISSLQSEDFAVYYCQQYNNWPLTFGGGTKVEIKRTVAAPSVFIFPPSDEQLKSGTASVVCLLNNFYPREAKVQWKVDNALQSGNSQESVTEQDSKDSTYSLSSTLTLSKADYEKHKVYACEVTHQGLSSPVTKSFNRGEC

SEQ ID NO: 3577 - protein, 500 aa, synthetic construct
  REGION 1..500: note = source = /note="Description of Artificial Sequence: Synthetic polypeptide"
HGEGTFTSDYSSYLEEQAAKEFIEWLKNGGGGGGGAGGGGAGGGGAGGGGQVQLVESGGGVVQPGRSLRLSCAASGFTFSNYGMHWVRQAPGEGLEWVAAIWFDASDKYYADAVKGRFTISRDNSKNTLYLQMNSLRAEDTAVYYCARDQAIFGVVPDYWGQGTLVTVSSASTKGPSVFPLAPSSKSTSGGTAALGCLVKDYFPEPVTVSWNSGALTSGVHTFPAVLQSSGLYSLSSVVTVPSSSLGTQTYICNVNHKPSNTKVDKKVEPKSCDKTHTCPPCPAPELLGGPSVFLFPPKPKDTLMISRTPEVTCVVVDVSHEDPEVKFNWYVDGVEVHNAKTKPCEEQYGSTYRCVSVLTVLHQDWLNGKEYKCKVSNKALPAPIEKTISKAKGQPREPQVYTLPPSREEMTKNQVSLTCLVKGFYPSDIAVEWESNGQPENNYKTTPPVLDSDGSFFLYSKLTVDKSRWQQGNVFSCSVMHEALHNHYTQKSLSLSPGK

SEQ ID NO: 3578 - protein, 264 aa, synthetic construct
  REGION 1..264: note = source = /note="Description of Artificial Sequence: Synthetic polypeptide"
HGEGTFTSDYSSYLEEQAAKEFIEWLKNGGGGGGGAGGGGAGGGGAGGGGEIVMTQSPATLSVSPGERATLSCRASQSVSSNLAWYQQKPGQAPRLLIYGAATRATGIPARVSGSGSGTEFTLTISSLQSEDFAVYYCQQYNNWPLTFGGGTKVEIKRTVAAPSVFIFPPSDEQLKSGTASVVCLLNNFYPREAKVQWKVDNALQSGNSQESVTEQDSKDSTYSLSSTLTLSKADYEKHKVYACEVTHQGLSSPVTKSFNRGEC

SEQ ID NO: 3579 - protein, 504 aa, synthetic construct
  REGION 1..504: note = source = /note="Description of Artificial Sequence: Synthetic polypeptide"
HGEGTFTSEVSSYLEGQAAKEFIEWLKNGGGGSGSATGGSGSVASSGSGSATHLQVQLVESGGGVVQPGRSLRLSCAASGFTFSNYGMHWVRQAPGEGLEWVAAIWFDASDKYYADAVKGRFTISRDNSKNTLYLQMNSLRAEDTAVYYCARDQAIFGVVPDYWGQGTLVTVSSASTKGPSVFPLAPSSKSTSGGTAALGCLVKDYFPEPVTVSWNSGALTSGVHTFPAVLQSSGLYSLSSVVTVPSSSLGTQTYICNVNHKPSNTKVDKKVEPKSCDKTHTCPPCPAPELLGGPSVFLFPPKPKDTLMISRTPEVTCVVVDVSHEDPEVKFNWYVDGVEVHNAKTKPCEEQYGSTYRCVSVLTVLHQDWLNGKEYKCKVSNKALPAPIEKTISKAKGQPREPQVYTLPPSREEMTKNQVSLTCLVKGFYPSDIAVEWESNGQPENNYKTTPPVLDSDGSFFLYSKLTVDKSRWQQGNVFSCSVMHEALHNHYTQKSLSLSPGK

SEQ ID NO: 3580 - protein, 268 aa, synthetic construct
  REGION 1..268: note = source = /note="Description of Artificial Sequence: Synthetic polypeptide"
HGEGTFTSEVSSYLEGQAAKEFIEWLKNGGGGSGSATGGSGSVASSGSGSATHLEIVMTQSPATLSVSPGERATLSCRASQSVSSNLAWYQQKPGQAPRLLIYGAATRATGIPARVSGSGSGTEFTLTISSLQSEDFAVYYCQQYNNWPLTFGGGTKVEIKRTVAAPSVFIFPPSDEQLKSGTASVVCLLNNFYPREAKVQWKVDNALQSGNSQESVTEQDSKDSTYSLSSTLTLSKADYEKHKVYACEVTHQGLSSPVTKSFNRGEC

SEQ ID NO: 3581 - protein, 503 aa, synthetic construct
  REGION 1..503: note = source = /note="Description of Artificial Sequence: Synthetic polypeptide"
HGEGTFTSEVSSYLEGQAAKEFIEWLKNGGGGAPAPAPAPAPAPAPAPAPAPGQVQLVESGGGVVQPGRSLRLSCAASGFTFSNYGMHWVRQAPGEGLEWVAAIWFDASDKYYADAVKGRFTISRDNSKNTLYLQMNSLRAEDTAVYYCARDQAIFGVVPDYWGQGTLVTVSSASTKGPSVFPLAPSSKSTSGGTAALGCLVKDYFPEPVTVSWNSGALTSGVHTFPAVLQSSGLYSLSSVVTVPSSSLGTQTYICNVNHKPSNTKVDKKVEPKSCDKTHTCPPCPAPELLGGPSVFLFPPKPKDTLMISRTPEVTCVVVDVSHEDPEVKFNWYVDGVEVHNAKTKPCEEQYGSTYRCVSVLTVLHQDWLNGKEYKCKVSNKALPAPIEKTISKAKGQPREPQVYTLPPSREEMTKNQVSLTCLVKGFYPSDIAVEWESNGQPENNYKTTPPVLDSDGSFFLYSKLTVDKSRWQQGNVFSCSVMHEALHNHYTQKSLSLSPGK

SEQ ID NO: 3582 - protein, 267 aa, synthetic construct
  REGION 1..267: note = source = /note="Description of Artificial Sequence: Synthetic polypeptide"
HGEGTFTSEVSSYLEGQAAKEFIEWLKNGGGGAPAPAPAPAPAPAPAPAPAPGEIVMTQSPATLSVSPGERATLSCRASQSVSSNLAWYQQKPGQAPRLLIYGAATRATGIPARVSGSGSGTEFTLTISSLQSEDFAVYYCQQYNNWPLTFGGGTKVEIKRTVAAPSVFIFPPSDEQLKSGTASVVCLLNNFYPREAKVQWKVDNALQSGNSQESVTEQDSKDSTYSLSSTLTLSKADYEKHKVYACEVTHQGLSSPVTKSFNRGEC

SEQ ID NO: 3583 - protein, 500 aa, synthetic construct
  REGION 1..500: note = source = /note="Description of Artificial Sequence: Synthetic polypeptide"
HGEGTFTSEVSSYLEGQAAKEFIEWLKNGGGGGGGAGGGGAGGGGAGGGGQVQLVESGGGVVQPGRSLRLSCAASGFTFSNYGMHWVRQAPGEGLEWVAAIWFDASDKYYADAVKGRFTISRDNSKNTLYLQMNSLRAEDTAVYYCARDQAIFGVVPDYWGQGTLVTVSSASTKGPSVFPLAPSSKSTSGGTAALGCLVKDYFPEPVTVSWNSGALTSGVHTFPAVLQSSGLYSLSSVVTVPSSSLGTQTYICNVNHKPSNTKVDKKVEPKSCDKTHTCPPCPAPELLGGPSVFLFPPKPKDTLMISRTPEVTCVVVDVSHEDPEVKFNWYVDGVEVHNAKTKPCEEQYGSTYRCVSVLTVLHQDWLNGKEYKCKVSNKALPAPIEKTISKAKGQPREPQVYTLPPSREEMTKNQVSLTCLVKGFYPSDIAVEWESNGQPENNYKTTPPVLDSDGSFFLYSKLTVDKSRWQQGNVFSCSVMHEALHNHYTQKSLSLSPGK

SEQ ID NO: 3584 - protein, 264 aa, synthetic construct
  REGION 1..264: note = source = /note="Description of Artificial Sequence: Synthetic polypeptide"
HGEGTFTSEVSSYLEGQAAKEFIEWLKNGGGGGGGAGGGGAGGGGAGGGGEIVMTQSPATLSVSPGERATLSCRASQSVSSNLAWYQQKPGQAPRLLIYGAATRATGIPARVSGSGSGTEFTLTISSLQSEDFAVYYCQQYNNWPLTFGGGTKVEIKRTVAAPSVFIFPPSDEQLKSGTASVVCLLNNFYPREAKVQWKVDNALQSGNSQESVTEQDSKDSTYSLSSTLTLSKADYEKHKVYACEVTHQGLSSPVTKSFNRGEC

SEQ ID NO: 3585 - protein, 264 aa, synthetic construct
  REGION 1..264: note = source = /note="Description of Artificial Sequence: Synthetic polypeptide"
HGEGTFTSDVSSYLEEQAAKEFIEWLKNEGGGGGGAGGGGAGGGGAGGGGEIVMTQSPATLSVSPGERATLSCRASQSVSSNLAWYQQKPGQAPRLLIYGAATRATGIPARFSGSGSGTEFTLTISSLQSEDFAVYYCQQYNNWPLTFGGGTKVEIKRTVAAPSVFIFPPSDEQLKSGTASVVCLLNNFYPREAKVQWKVDNALQSGNSQESVTEQDSKDSTYSLSSTLTLSKADYEKHKVYACEVTHQGLSSPVTKSFNRGEC

SEQ ID NO: 3586 - protein, 264 aa, synthetic construct
  REGION 1..264: note = source = /note="Description of Artificial Sequence: Synthetic polypeptide"
HGEGTFTSDVSSYLEEQAAKEFIEWLKNEGGGGGGAGGGGAGGGGAGGGGEIVMTQSPATLSVSPGERATLSCRASQSVDLHLAWYQQKPGQAPRLLIYEAATRATGIPARFSGSGSGTEFTLTISSLQSEDFAVYYCQQYQNWPLTFGGGTKVEIKRTVAAPSVFIFPPSDEQLKSGTASVVCLLNNFYPREAKVQWKVDNALQSGNSQESVTEQDSKDSTYSLSSTLTLSKADYEKHKVYACEVTHQGLSSPVTKSFNRGEC

SEQ ID NO: 3587 - protein, 264 aa, synthetic construct
  REGION 1..264: note = source = /note="Description of Artificial Sequence: Synthetic polypeptide"
HGEGTFTSDVSSYLEEQAAKEFIEWLKNEGGGGGGAGGGGAGGGGAGGGGEIVLTQSPATLSLSPGERATLSCRASQSVSSNLAWYQQKPGQAPRLLIYGAATRATGIPDRFSGSGSGTEFTLTISRLEPEDFAVYYCQQYNNWPLTFGGGTKVEIKRTVAAPSVFIFPPSDEQLKSGTASVVCLLNNFYPREAKVQWKVDNALQSGNSQESVTEQDSKDSTYSLSSTLTLSKADYEKHKVYACEVTHQGLSSPVTKSFNRGEC

SEQ ID NO: 3588 - protein, 264 aa, synthetic construct
  REGION 1..264: note = source = /note="Description of Artificial Sequence: Synthetic polypeptide"
HGEGTFTSDVSSYLEEQAAKEFIEWLKNEGGGGGGAGGGGAGGGGAGGGGEIVLTQSPATLSLSPGERATLSCRASQSVLSHLAWYQQKPGQAPRLLIYEAATRATGIPDRFSGSGSGTEFTLTISRLEPEDFAVYYCQQYQNWPLTFGGGTKVEIKRTVAAPSVFIFPPSDEQLKSGTASVVCLLNNFYPREAKVQWKVDNALQSGNSQESVTEQDSKDSTYSLSSTLTLSKADYEKHKVYACEVTHQGLSSPVTKSFNRGEC

SEQ ID NO: 3589 - protein, 264 aa, synthetic construct
  REGION 1..264: note = source = /note="Description of Artificial Sequence: Synthetic polypeptide"
HGEGTFTSDVSSYLEEQAAKEFIEWLKNEGGGGGGAGGGGAGGGGAGGGGEIVLTQSPATLSLSPGERATLSCRASQSVDLHLAWYQQKPGQAPRLLIYEAATRATGIPDRFSGSGSGTEFTLTISRLEPEDFAVYYCQQYQNWPLTFGGGTKVEIKRTVAAPSVFIFPPSDEQLKSGTASVVCLLNNFYPREAKVQWKVDNALQSGNSQESVTEQDSKDSTYSLSSTLTLSKADYEKHKVYACEVTHQGLSSPVTKSFNRGEC

SEQ ID NO: 3590 - protein, 264 aa, synthetic construct
  REGION 1..264: note = source = /note="Description of Artificial Sequence: Synthetic polypeptide"
HSEGTFTSDVSSYLEEQAAKEFIEWLKNEGGGGGGAGGGGAGGGGAGGGGEIVMTQSPATLSVSPGERATLSCRASQSVSSNLAWYQQKPGQAPRLLIYGAATRATGIPARFSGSGSGTEFTLTISSLQSEDFAVYYCQQYNNWPLTFGGGTKVEIKRTVAAPSVFIFPPSDEQLKSGTASVVCLLNNFYPREAKVQWKVDNALQSGNSQESVTEQDSKDSTYSLSSTLTLSKADYEKHKVYACEVTHQGLSSPVTKSFNRGEC

SEQ ID NO: 3591 - protein, 264 aa, synthetic construct
  REGION 1..264: note = source = /note="Description of Artificial Sequence: Synthetic polypeptide"
HSEGTFTSDVSSYLEEQAAKEFIEWLKNEGGGGGGAGGGGAGGGGAGGGGEIVMTQSPATLSVSPGERATLSCRASQSVDLHLAWYQQKPGQAPRLLIYEAATRATGIPARFSGSGSGTEFTLTISSLQSEDFAVYYCQQYQNWPLTFGGGTKVEIKRTVAAPSVFIFPPSDEQLKSGTASVVCLLNNFYPREAKVQWKVDNALQSGNSQESVTEQDSKDSTYSLSSTLTLSKADYEKHKVYACEVTHQGLSSPVTKSFNRGEC

SEQ ID NO: 3592 - protein, 264 aa, synthetic construct
  REGION 1..264: note = source = /note="Description of Artificial Sequence: Synthetic polypeptide"
HSEGTFTSDVSSYLEEQAAKEFIEWLKNEGGGGGGAGGGGAGGGGAGGGGEIVLTQSPATLSLSPGERATLSCRASQSVSSNLAWYQQKPGQAPRLLIYGAATRATGIPDRFSGSGSGTEFTLTISRLEPEDFAVYYCQQYNNWPLTFGGGTKVEIKRTVAAPSVFIFPPSDEQLKSGTASVVCLLNNFYPREAKVQWKVDNALQSGNSQESVTEQDSKDSTYSLSSTLTLSKADYEKHKVYACEVTHQGLSSPVTKSFNRGEC

SEQ ID NO: 3593 - protein, 264 aa, synthetic construct
  REGION 1..264: note = source = /note="Description of Artificial Sequence: Synthetic polypeptide"
HSEGTFTSDVSSYLEEQAAKEFIEWLKNEGGGGGGAGGGGAGGGGAGGGGEIVLTQSPATLSLSPGERATLSCRASQSVLSHLAWYQQKPGQAPRLLIYEAATRATGIPDRFSGSGSGTEFTLTISRLEPEDFAVYYCQQYQNWPLTFGGGTKVEIKRTVAAPSVFIFPPSDEQLKSGTASVVCLLNNFYPREAKVQWKVDNALQSGNSQESVTEQDSKDSTYSLSSTLTLSKADYEKHKVYACEVTHQGLSSPVTKSFNRGEC

SEQ ID NO: 3594 - protein, 264 aa, synthetic construct
  REGION 1..264: note = source = /note="Description of Artificial Sequence: Synthetic polypeptide"
HSEGTFTSDVSSYLEEQAAKEFIEWLKNEGGGGGGAGGGGAGGGGAGGGGEIVLTQSPATLSLSPGERATLSCRASQSVDLHLAWYQQKPGQAPRLLIYEAATRATGIPDRFSGSGSGTEFTLTISRLEPEDFAVYYCQQYQNWPLTFGGGTKVEIKRTVAAPSVFIFPPSDEQLKSGTASVVCLLNNFYPREAKVQWKVDNALQSGNSQESVTEQDSKDSTYSLSSTLTLSKADYEKHKVYACEVTHQGLSSPVTKSFNRGEC

SEQ ID NO: 3595 - protein, 264 aa, synthetic construct
  REGION 1..264: note = source = /note="Description of Artificial Sequence: Synthetic polypeptide"
HGEGTFTSDVSSYLEEQAAKEFIEWLKNPGGGGGGAGGGGAGGGGAGGGGEIVMTQSPATLSVSPGERATLSCRASQSVSSNLAWYQQKPGQAPRLLIYGAATRATGIPARFSGSGSGTEFTLTISSLQSEDFAVYYCQQYNNWPLTFGGGTKVEIKRTVAAPSVFIFPPSDEQLKSGTASVVCLLNNFYPREAKVQWKVDNALQSGNSQESVTEQDSKDSTYSLSSTLTLSKADYEKHKVYACEVTHQGLSSPVTKSFNRGEC

SEQ ID NO: 3596 - protein, 264 aa, synthetic construct
  REGION 1..264: note = source = /note="Description of Artificial Sequence: Synthetic polypeptide"
HGEGTFTSDVSSYLEEQAAKEFIEWLKNPGGGGGGAGGGGAGGGGAGGGGEIVMTQSPATLSVSPGERATLSCRASQSVDLHLAWYQQKPGQAPRLLIYEAATRATGIPARFSGSGSGTEFTLTISSLQSEDFAVYYCQQYQNWPLTFGGGTKVEIKRTVAAPSVFIFPPSDEQLKSGTASVVCLLNNFYPREAKVQWKVDNALQSGNSQESVTEQDSKDSTYSLSSTLTLSKADYEKHKVYACEVTHQGLSSPVTKSFNRGEC

SEQ ID NO: 3597 - protein, 264 aa, synthetic construct
  REGION 1..264: note = source = /note="Description of Artificial Sequence: Synthetic polypeptide"
HGEGTFTSDVSSYLEEQAAKEFIEWLKNPGGGGGGAGGGGAGGGGAGGGGEIVLTQSPATLSLSPGERATLSCRASQSVSSNLAWYQQKPGQAPRLLIYGAATRATGIPDRFSGSGSGTEFTLTISRLEPEDFAVYYCQQYNNWPLTFGGGTKVEIKRTVAAPSVFIFPPSDEQLKSGTASVVCLLNNFYPREAKVQWKVDNALQSGNSQESVTEQDSKDSTYSLSSTLTLSKADYEKHKVYACEVTHQGLSSPVTKSFNRGEC

SEQ ID NO: 3598 - protein, 264 aa, synthetic construct
  REGION 1..264: note = source = /note="Description of Artificial Sequence: Synthetic polypeptide"
HGEGTFTSDVSSYLEEQAAKEFIEWLKNPGGGGGGAGGGGAGGGGAGGGGEIVLTQSPATLSLSPGERATLSCRASQSVLSHLAWYQQKPGQAPRLLIYEAATRATGIPDRFSGSGSGTEFTLTISRLEPEDFAVYYCQQYQNWPLTFGGGTKVEIKRTVAAPSVFIFPPSDEQLKSGTASVVCLLNNFYPREAKVQWKVDNALQSGNSQESVTEQDSKDSTYSLSSTLTLSKADYEKHKVYACEVTHQGLSSPVTKSFNRGEC

SEQ ID NO: 3599 - protein, 264 aa, synthetic construct
  REGION 1..264: note = source = /note="Description of Artificial Sequence: Synthetic polypeptide"
HGEGTFTSDVSSYLEEQAAKEFIEWLKNPGGGGGGAGGGGAGGGGAGGGGEIVLTQSPATLSLSPGERATLSCRASQSVDLHLAWYQQKPGQAPRLLIYEAATRATGIPDRFSGSGSGTEFTLTISRLEPEDFAVYYCQQYQNWPLTFGGGTKVEIKRTVAAPSVFIFPPSDEQLKSGTASVVCLLNNFYPREAKVQWKVDNALQSGNSQESVTEQDSKDSTYSLSSTLTLSKADYEKHKVYACEVTHQGLSSPVTKSFNRGEC

SEQ ID NO: 3600 - protein, 264 aa, synthetic construct
  REGION 1..264: note = source = /note="Description of Artificial Sequence: Synthetic polypeptide"
HSEGTFTSDVSSYLEEQAAKEFIEWLKNPGGGGGGAGGGGAGGGGAGGGGEIVMTQSPATLSVSPGERATLSCRASQSVSSNLAWYQQKPGQAPRLLIYGAATRATGIPARFSGSGSGTEFTLTISSLQSEDFAVYYCQQYNNWPLTFGGGTKVEIKRTVAAPSVFIFPPSDEQLKSGTASVVCLLNNFYPREAKVQWKVDNALQSGNSQESVTEQDSKDSTYSLSSTLTLSKADYEKHKVYACEVTHQGLSSPVTKSFNRGEC

SEQ ID NO: 3601 - protein, 264 aa, synthetic construct
  REGION 1..264: note = source = /note="Description of Artificial Sequence: Synthetic polypeptide"
HSEGTFTSDVSSYLEEQAAKEFIEWLKNPGGGGGGAGGGGAGGGGAGGGGEIVMTQSPATLSVSPGERATLSCRASQSVDLHLAWYQQKPGQAPRLLIYEAATRATGIPARFSGSGSGTEFTLTISSLQSEDFAVYYCQQYQNWPLTFGGGTKVEIKRTVAAPSVFIFPPSDEQLKSGTASVVCLLNNFYPREAKVQWKVDNALQSGNSQESVTEQDSKDSTYSLSSTLTLSKADYEKHKVYACEVTHQGLSSPVTKSFNRGEC

SEQ ID NO: 3602 - protein, 286 aa, synthetic construct
  REGION 1..286: note = source = /note="Description of Artificial Sequence: Synthetic polypeptide"
MDMRVPAQLLGLLLLWLRGARCHSEGTFTSDVSSYLEEQAAKEFIEWLKNPGGGGGGAGGGGAGGGGAGGGGEIVLTQSPATLSLSPGERATLSCRASQSVSSNLAWYQQKPGQAPRLLIYGAATRATGIPDRFSGSGSGTEFTLTISRLEPEDFAVYYCQQYNNWPLTFGGGTKVEIKRTVAAPSVFIFPPSDEQLKSGTASVVCLLNNFYPREAKVQWKVDNALQSGNSQESVTEQDSKDSTYSLSSTLTLSKADYEKHKVYACEVTHQGLSSPVTKSFNRGEC

SEQ ID NO: 3603 - protein, 264 aa, synthetic construct
  REGION 1..264: note = source = /note="Description of Artificial Sequence: Synthetic polypeptide"
HSEGTFTSDVSSYLEEQAAKEFIEWLKNPGGGGGGAGGGGAGGGGAGGGGEIVLTQSPATLSLSPGERATLSCRASQSVLSHLAWYQQKPGQAPRLLIYEAATRATGIPDRFSGSGSGTEFTLTISRLEPEDFAVYYCQQYQNWPLTFGGGTKVEIKRTVAAPSVFIFPPSDEQLKSGTASVVCLLNNFYPREAKVQWKVDNALQSGNSQESVTEQDSKDSTYSLSSTLTLSKADYEKHKVYACEVTHQGLSSPVTKSFNRGEC

SEQ ID NO: 3604 - protein, 286 aa, synthetic construct
  REGION 1..286: note = source = /note="Description of Artificial Sequence: Synthetic polypeptide"
MDMRVPAQLLGLLLLWLRGARCHSEGTFTSDVSSYLEEQAAKEFIEWLKNPGGGGGGAGGGGAGGGGAGGGGEIVLTQSPATLSLSPGERATLSCRASQSVDLHLAWYQQKPGQAPRLLIYEAATRATGIPDRFSGSGSGTEFTLTISRLEPEDFAVYYCQQYQNWPLTFGGGTKVEIKRTVAAPSVFIFPPSDEQLKSGTASVVCLLNNFYPREAKVQWKVDNALQSGNSQESVTEQDSKDSTYSLSSTLTLSKADYEKHKVYACEVTHQGLSSPVTKSFNRGEC

SEQ ID NO: 3605 - protein, 264 aa, synthetic construct
  REGION 1..264: note = source = /note="Description of Artificial Sequence: Synthetic polypeptide"
HGEGTFTSDVSSYLEEQAAKEFIEWLKNQGGGGGGAGGGGAGGGGAGGGGEIVMTQSPATLSVSPGERATLSCRASQSVSSNLAWYQQKPGQAPRLLIYGAATRATGIPARFSGSGSGTEFTLTISSLQSEDFAVYYCQQYNNWPLTFGGGTKVEIKRTVAAPSVFIFPPSDEQLKSGTASVVCLLNNFYPREAKVQWKVDNALQSGNSQESVTEQDSKDSTYSLSSTLTLSKADYEKHKVYACEVTHQGLSSPVTKSFNRGEC

SEQ ID NO: 3606 - protein, 286 aa, synthetic construct
  REGION 1..286: note = source = /note="Description of Artificial Sequence: Synthetic polypeptide"
MDMRVPAQLLGLLLLWLRGARCHGEGTFTSDVSSYLEEQAAKEFIEWLKNQGGGGGGAGGGGAGGGGAGGGGEIVMTQSPATLSVSPGERATLSCRASQSVDLHLAWYQQKPGQAPRLLIYEAATRATGIPARFSGSGSGTEFTLTISSLQSEDFAVYYCQQYQNWPLTFGGGTKVEIKRTVAAPSVFIFPPSDEQLKSGTASVVCLLNNFYPREAKVQWKVDNALQSGNSQESVTEQDSKDSTYSLSSTLTLSKADYEKHKVYACEVTHQGLSSPVTKSFNRGEC

SEQ ID NO: 3607 - protein, 264 aa, synthetic construct
  REGION 1..264: note = source = /note="Description of Artificial Sequence: Synthetic polypeptide"
HGEGTFTSDVSSYLEEQAAKEFIEWLKNQGGGGGGAGGGGAGGGGAGGGGEIVLTQSPATLSLSPGERATLSCRASQSVSSNLAWYQQKPGQAPRLLIYGAATRATGIPDRFSGSGSGTEFTLTISRLEPEDFAVYYCQQYNNWPLTFGGGTKVEIKRTVAAPSVFIFPPSDEQLKSGTASVVCLLNNFYPREAKVQWKVDNALQSGNSQESVTEQDSKDSTYSLSSTLTLSKADYEKHKVYACEVTHQGLSSPVTKSFNRGEC

SEQ ID NO: 3608 - protein, 264 aa, synthetic construct
  REGION 1..264: note = source = /note="Description of Artificial Sequence: Synthetic polypeptide"
HGEGTFTSDVSSYLEEQAAKEFIEWLKNQGGGGGGAGGGGAGGGGAGGGGEIVLTQSPATLSLSPGERATLSCRASQSVLSHLAWYQQKPGQAPRLLIYEAATRATGIPDRFSGSGSGTEFTLTISRLEPEDFAVYYCQQYQNWPLTFGGGTKVEIKRTVAAPSVFIFPPSDEQLKSGTASVVCLLNNFYPREAKVQWKVDNALQSGNSQESVTEQDSKDSTYSLSSTLTLSKADYEKHKVYACEVTHQGLSSPVTKSFNRGEC

SEQ ID NO: 3609 - protein, 264 aa, synthetic construct
  REGION 1..264: note = source = /note="Description of Artificial Sequence: Synthetic polypeptide"
HGEGTFTSDVSSYLEEQAAKEFIEWLKNQGGGGGGAGGGGAGGGGAGGGGEIVLTQSPATLSLSPGERATLSCRASQSVDLHLAWYQQKPGQAPRLLIYEAATRATGIPDRFSGSGSGTEFTLTISRLEPEDFAVYYCQQYQNWPLTFGGGTKVEIKRTVAAPSVFIFPPSDEQLKSGTASVVCLLNNFYPREAKVQWKVDNALQSGNSQESVTEQDSKDSTYSLSSTLTLSKADYEKHKVYACEVTHQGLSSPVTKSFNRGEC

SEQ ID NO: 3610 - protein, 264 aa, synthetic construct
  REGION 1..264: note = source = /note="Description of Artificial Sequence: Synthetic polypeptide"
HSEGTFTSDVSSYLEEQAAKEFIEWLKNQGGGGGGAGGGGAGGGGAGGGGEIVMTQSPATLSVSPGERATLSCRASQSVSSNLAWYQQKPGQAPRLLIYGAATRATGIPARFSGSGSGTEFTLTISSLQSEDFAVYYCQQYNNWPLTFGGGTKVEIKRTVAAPSVFIFPPSDEQLKSGTASVVCLLNNFYPREAKVQWKVDNALQSGNSQESVTEQDSKDSTYSLSSTLTLSKADYEKHKVYACEVTHQGLSSPVTKSFNRGEC

SEQ ID NO: 3611 - protein, 264 aa, synthetic construct
  REGION 1..264: note = source = /note="Description of Artificial Sequence: Synthetic polypeptide"
HSEGTFTSDVSSYLEEQAAKEFIEWLKNQGGGGGGAGGGGAGGGGAGGGGEIVMTQSPATLSVSPGERATLSCRASQSVDLHLAWYQQKPGQAPRLLIYEAATRATGIPARFSGSGSGTEFTLTISSLQSEDFAVYYCQQYQNWPLTFGGGTKVEIKRTVAAPSVFIFPPSDEQLKSGTASVVCLLNNFYPREAKVQWKVDNALQSGNSQESVTEQDSKDSTYSLSSTLTLSKADYEKHKVYACEVTHQGLSSPVTKSFNRGEC

SEQ ID NO: 3612 - protein, 264 aa, synthetic construct
  REGION 1..264: note = source = /note="Description of Artificial Sequence: Synthetic polypeptide"
HSEGTFTSDVSSYLEEQAAKEFIEWLKNQGGGGGGAGGGGAGGGGAGGGGEIVLTQSPATLSLSPGERATLSCRASQSVSSNLAWYQQKPGQAPRLLIYGAATRATGIPDRFSGSGSGTEFTLTISRLEPEDFAVYYCQQYNNWPLTFGGGTKVEIKRTVAAPSVFIFPPSDEQLKSGTASVVCLLNNFYPREAKVQWKVDNALQSGNSQESVTEQDSKDSTYSLSSTLTLSKADYEKHKVYACEVTHQGLSSPVTKSFNRGEC

SEQ ID NO: 3613 - protein, 264 aa, synthetic construct
  REGION 1..264: note = source = /note="Description of Artificial Sequence: Synthetic polypeptide"
HSEGTFTSDVSSYLEEQAAKEFIEWLKNQGGGGGGAGGGGAGGGGAGGGGEIVLTQSPATLSLSPGERATLSCRASQSVLSHLAWYQQKPGQAPRLLIYEAATRATGIPDRFSGSGSGTEFTLTISRLEPEDFAVYYCQQYQNWPLTFGGGTKVEIKRTVAAPSVFIFPPSDEQLKSGTASVVCLLNNFYPREAKVQWKVDNALQSGNSQESVTEQDSKDSTYSLSSTLTLSKADYEKHKVYACEVTHQGLSSPVTKSFNRGEC

SEQ ID NO: 3614 - protein, 264 aa, synthetic construct
  REGION 1..264: note = source = /note="Description of Artificial Sequence: Synthetic polypeptide"
HSEGTFTSDVSSYLEEQAAKEFIEWLKNQGGGGGGAGGGGAGGGGAGGGGEIVLTQSPATLSLSPGERATLSCRASQSVDLHLAWYQQKPGQAPRLLIYEAATRATGIPDRFSGSGSGTEFTLTISRLEPEDFAVYYCQQYQNWPLTFGGGTKVEIKRTVAAPSVFIFPPSDEQLKSGTASVVCLLNNFYPREAKVQWKVDNALQSGNSQESVTEQDSKDSTYSLSSTLTLSKADYEKHKVYACEVTHQGLSSPVTKSFNRGEC

SEQ ID NO: 3615 - protein, 264 aa, synthetic construct
  REGION 1..264: note = source = /note="Description of Artificial Sequence: Synthetic polypeptide"
HGEGTFTSDVSSYLEEQAAKEFIEWLKNTGGGGGGAGGGGAGGGGAGGGGEIVMTQSPATLSVSPGERATLSCRASQSVSSNLAWYQQKPGQAPRLLIYGAATRATGIPARFSGSGSGTEFTLTISSLQSEDFAVYYCQQYNNWPLTFGGGTKVEIKRTVAAPSVFIFPPSDEQLKSGTASVVCLLNNFYPREAKVQWKVDNALQSGNSQESVTEQDSKDSTYSLSSTLTLSKADYEKHKVYACEVTHQGLSSPVTKSFNRGEC

SEQ ID NO: 3616 - protein, 264 aa, synthetic construct
  REGION 1..264: note = source = /note="Description of Artificial Sequence: Synthetic polypeptide"
HGEGTFTSDVSSYLEEQAAKEFIEWLKNTGGGGGGAGGGGAGGGGAGGGGEIVMTQSPATLSVSPGERATLSCRASQSVDLHLAWYQQKPGQAPRLLIYEAATRATGIPARFSGSGSGTEFTLTISSLQSEDFAVYYCQQYQNWPLTFGGGTKVEIKRTVAAPSVFIFPPSDEQLKSGTASVVCLLNNFYPREAKVQWKVDNALQSGNSQESVTEQDSKDSTYSLSSTLTLSKADYEKHKVYACEVTHQGLSSPVTKSFNRGEC

SEQ ID NO: 3617 - protein, 264 aa, synthetic construct
  REGION 1..264: note = source = /note="Description of Artificial Sequence: Synthetic polypeptide"
HGEGTFTSDVSSYLEEQAAKEFIEWLKNTGGGGGGAGGGGAGGGGAGGGGEIVLTQSPATLSLSPGERATLSCRASQSVSSNLAWYQQKPGQAPRLLIYGAATRATGIPDRFSGSGSGTEFTLTISRLEPEDFAVYYCQQYNNWPLTFGGGTKVEIKRTVAAPSVFIFPPSDEQLKSGTASVVCLLNNFYPREAKVQWKVDNALQSGNSQESVTEQDSKDSTYSLSSTLTLSKADYEKHKVYACEVTHQGLSSPVTKSFNRGEC

SEQ ID NO: 3618 - protein, 286 aa, synthetic construct
  REGION 1..286: note = source = /note="Description of Artificial Sequence: Synthetic polypeptide"
MDMRVPAQLLGLLLLWLRGARCHGEGTFTSDVSSYLEEQAAKEFIEWLKNTGGGGGGAGGGGAGGGGAGGGGEIVLTQSPATLSLSPGERATLSCRASQSVLSHLAWYQQKPGQAPRLLIYEAATRATGIPDRFSGSGSGTEFTLTISRLEPEDFAVYYCQQYQNWPLTFGGGTKVEIKRTVAAPSVFIFPPSDEQLKSGTASVVCLLNNFYPREAKVQWKVDNALQSGNSQESVTEQDSKDSTYSLSSTLTLSKADYEKHKVYACEVTHQGLSSPVTKSFNRGEC

SEQ ID NO: 3619 - protein, 286 aa, synthetic construct
  REGION 1..286: note = source = /note="Description of Artificial Sequence: Synthetic polypeptide"
MDMRVPAQLLGLLLLWLRGARCHGEGTFTSDVSSYLEEQAAKEFIEWLKNTGGGGGGAGGGGAGGGGAGGGGEIVLTQSPATLSLSPGERATLSCRASQSVDLHLAWYQQKPGQAPRLLIYEAATRATGIPDRFSGSGSGTEFTLTISRLEPEDFAVYYCQQYQNWPLTFGGGTKVEIKRTVAAPSVFIFPPSDEQLKSGTASVVCLLNNFYPREAKVQWKVDNALQSGNSQESVTEQDSKDSTYSLSSTLTLSKADYEKHKVYACEVTHQGLSSPVTKSFNRGEC

SEQ ID NO: 3620 - protein, 286 aa, synthetic construct
  REGION 1..286: note = source = /note="Description of Artificial Sequence: Synthetic polypeptide"
MDMRVPAQLLGLLLLWLRGARCHSEGTFTSDVSSYLEEQAAKEFIEWLKNTGGGGGGAGGGGAGGGGAGGGGEIVMTQSPATLSVSPGERATLSCRASQSVSSNLAWYQQKPGQAPRLLIYGAATRATGIPARFSGSGSGTEFTLTISSLQSEDFAVYYCQQYNNWPLTFGGGTKVEIKRTVAAPSVFIFPPSDEQLKSGTASVVCLLNNFYPREAKVQWKVDNALQSGNSQESVTEQDSKDSTYSLSSTLTLSKADYEKHKVYACEVTHQGLSSPVTKSFNRGEC

SEQ ID NO: 3621 - protein, 264 aa, synthetic construct
  REGION 1..264: note = source = /note="Description of Artificial Sequence: Synthetic polypeptide"
HSEGTFTSDVSSYLEEQAAKEFIEWLKNTGGGGGGAGGGGAGGGGAGGGGEIVMTQSPATLSVSPGERATLSCRASQSVDLHLAWYQQKPGQAPRLLIYEAATRATGIPARFSGSGSGTEFTLTISSLQSEDFAVYYCQQYQNWPLTFGGGTKVEIKRTVAAPSVFIFPPSDEQLKSGTASVVCLLNNFYPREAKVQWKVDNALQSGNSQESVTEQDSKDSTYSLSSTLTLSKADYEKHKVYACEVTHQGLSSPVTKSFNRGEC

SEQ ID NO: 3622 - protein, 264 aa, synthetic construct
  REGION 1..264: note = source = /note="Description of Artificial Sequence: Synthetic polypeptide"
HSEGTFTSDVSSYLEEQAAKEFIEWLKNTGGGGGGAGGGGAGGGGAGGGGEIVLTQSPATLSLSPGERATLSCRASQSVSSNLAWYQQKPGQAPRLLIYGAATRATGIPDRFSGSGSGTEFTLTISRLEPEDFAVYYCQQYNNWPLTFGGGTKVEIKRTVAAPSVFIFPPSDEQLKSGTASVVCLLNNFYPREAKVQWKVDNALQSGNSQESVTEQDSKDSTYSLSSTLTLSKADYEKHKVYACEVTHQGLSSPVTKSFNRGEC

SEQ ID NO: 3623 - protein, 264 aa, synthetic construct
  REGION 1..264: note = source = /note="Description of Artificial Sequence: Synthetic polypeptide"
HSEGTFTSDVSSYLEEQAAKEFIEWLKNTGGGGGGAGGGGAGGGGAGGGGEIVLTQSPATLSLSPGERATLSCRASQSVLSHLAWYQQKPGQAPRLLIYEAATRATGIPDRFSGSGSGTEFTLTISRLEPEDFAVYYCQQYQNWPLTFGGGTKVEIKRTVAAPSVFIFPPSDEQLKSGTASVVCLLNNFYPREAKVQWKVDNALQSGNSQESVTEQDSKDSTYSLSSTLTLSKADYEKHKVYACEVTHQGLSSPVTKSFNRGEC

SEQ ID NO: 3624 - protein, 264 aa, synthetic construct
  REGION 1..264: note = source = /note="Description of Artificial Sequence: Synthetic polypeptide"
HSEGTFTSDVSSYLEEQAAKEFIEWLKNTGGGGGGAGGGGAGGGGAGGGGEIVLTQSPATLSLSPGERATLSCRASQSVDLHLAWYQQKPGQAPRLLIYEAATRATGIPDRFSGSGSGTEFTLTISRLEPEDFAVYYCQQYQNWPLTFGGGTKVEIKRTVAAPSVFIFPPSDEQLKSGTASVVCLLNNFYPREAKVQWKVDNALQSGNSQESVTEQDSKDSTYSLSSTLTLSKADYEKHKVYACEVTHQGLSSPVTKSFNRGEC

SEQ ID NO: 3625 - protein, 264 aa, synthetic construct
  REGION 1..264: note = source = /note="Description of Artificial Sequence: Synthetic polypeptide"
HGEGTFTSDVSSYLEEQAAKEFIEWLKNVGGGGGGAGGGGAGGGGAGGGGEIVMTQSPATLSVSPGERATLSCRASQSVSSNLAWYQQKPGQAPRLLIYGAATRATGIPARFSGSGSGTEFTLTISSLQSEDFAVYYCQQYNNWPLTFGGGTKVEIKRTVAAPSVFIFPPSDEQLKSGTASVVCLLNNFYPREAKVQWKVDNALQSGNSQESVTEQDSKDSTYSLSSTLTLSKADYEKHKVYACEVTHQGLSSPVTKSFNRGEC

SEQ ID NO: 3626 - protein, 264 aa, synthetic construct
  REGION 1..264: note = source = /note="Description of Artificial Sequence: Synthetic polypeptide"
HGEGTFTSDVSSYLEEQAAKEFIEWLKNVGGGGGGAGGGGAGGGGAGGGGEIVMTQSPATLSVSPGERATLSCRASQSVDLHLAWYQQKPGQAPRLLIYEAATRATGIPARFSGSGSGTEFTLTISSLQSEDFAVYYCQQYQNWPLTFGGGTKVEIKRTVAAPSVFIFPPSDEQLKSGTASVVCLLNNFYPREAKVQWKVDNALQSGNSQESVTEQDSKDSTYSLSSTLTLSKADYEKHKVYACEVTHQGLSSPVTKSFNRGEC

SEQ ID NO: 3627 - protein, 264 aa, synthetic construct
  REGION 1..264: note = source = /note="Description of Artificial Sequence: Synthetic polypeptide"
HGEGTFTSDVSSYLEEQAAKEFIEWLKNVGGGGGGAGGGGAGGGGAGGGGEIVLTQSPATLSLSPGERATLSCRASQSVSSNLAWYQQKPGQAPRLLIYGAATRATGIPDRFSGSGSGTEFTLTISRLEPEDFAVYYCQQYNNWPLTFGGGTKVEIKRTVAAPSVFIFPPSDEQLKSGTASVVCLLNNFYPREAKVQWKVDNALQSGNSQESVTEQDSKDSTYSLSSTLTLSKADYEKHKVYACEVTHQGLSSPVTKSFNRGEC

SEQ ID NO: 3628 - protein, 264 aa, synthetic construct
  REGION 1..264: note = source = /note="Description of Artificial Sequence: Synthetic polypeptide"
HGEGTFTSDVSSYLEEQAAKEFIEWLKNVGGGGGGAGGGGAGGGGAGGGGEIVLTQSPATLSLSPGERATLSCRASQSVLSHLAWYQQKPGQAPRLLIYEAATRATGIPDRFSGSGSGTEFTLTISRLEPEDFAVYYCQQYQNWPLTFGGGTKVEIKRTVAAPSVFIFPPSDEQLKSGTASVVCLLNNFYPREAKVQWKVDNALQSGNSQESVTEQDSKDSTYSLSSTLTLSKADYEKHKVYACEVTHQGLSSPVTKSFNRGEC

SEQ ID NO: 3629 - protein, 264 aa, synthetic construct
  REGION 1..264: note = source = /note="Description of Artificial Sequence: Synthetic polypeptide"
HGEGTFTSDVSSYLEEQAAKEFIEWLKNVGGGGGGAGGGGAGGGGAGGGGEIVLTQSPATLSLSPGERATLSCRASQSVDLHLAWYQQKPGQAPRLLIYEAATRATGIPDRFSGSGSGTEFTLTISRLEPEDFAVYYCQQYQNWPLTFGGGTKVEIKRTVAAPSVFIFPPSDEQLKSGTASVVCLLNNFYPREAKVQWKVDNALQSGNSQESVTEQDSKDSTYSLSSTLTLSKADYEKHKVYACEVTHQGLSSPVTKSFNRGEC

SEQ ID NO: 3630 - protein, 264 aa, synthetic construct
  REGION 1..264: note = source = /note="Description of Artificial Sequence: Synthetic polypeptide"
HSEGTFTSDVSSYLEEQAAKEFIEWLKNVGGGGGGAGGGGAGGGGAGGGGEIVMTQSPATLSVSPGERATLSCRASQSVSSNLAWYQQKPGQAPRLLIYGAATRATGIPARFSGSGSGTEFTLTISSLQSEDFAVYYCQQYNNWPLTFGGGTKVEIKRTVAAPSVFIFPPSDEQLKSGTASVVCLLNNFYPREAKVQWKVDNALQSGNSQESVTEQDSKDSTYSLSSTLTLSKADYEKHKVYACEVTHQGLSSPVTKSFNRGEC

SEQ ID NO: 3631 - protein, 264 aa, synthetic construct
  REGION 1..264: note = source = /note="Description of Artificial Sequence: Synthetic polypeptide"
HSEGTFTSDVSSYLEEQAAKEFIEWLKNVGGGGGGAGGGGAGGGGAGGGGEIVMTQSPATLSVSPGERATLSCRASQSVDLHLAWYQQKPGQAPRLLIYEAATRATGIPARFSGSGSGTEFTLTISSLQSEDFAVYYCQQYQNWPLTFGGGTKVEIKRTVAAPSVFIFPPSDEQLKSGTASVVCLLNNFYPREAKVQWKVDNALQSGNSQESVTEQDSKDSTYSLSSTLTLSKADYEKHKVYACEVTHQGLSSPVTKSFNRGEC

SEQ ID NO: 3632 - protein, 264 aa, synthetic construct
  REGION 1..264: note = source = /note="Description of Artificial Sequence: Synthetic polypeptide"
HSEGTFTSDVSSYLEEQAAKEFIEWLKNVGGGGGGAGGGGAGGGGAGGGGEIVLTQSPATLSLSPGERATLSCRASQSVSSNLAWYQQKPGQAPRLLIYGAATRATGIPDRFSGSGSGTEFTLTISRLEPEDFAVYYCQQYNNWPLTFGGGTKVEIKRTVAAPSVFIFPPSDEQLKSGTASVVCLLNNFYPREAKVQWKVDNALQSGNSQESVTEQDSKDSTYSLSSTLTLSKADYEKHKVYACEVTHQGLSSPVTKSFNRGEC

SEQ ID NO: 3633 - protein, 264 aa, synthetic construct
  REGION 1..264: note = source = /note="Description of Artificial Sequence: Synthetic polypeptide"
HSEGTFTSDVSSYLEEQAAKEFIEWLKNVGGGGGGAGGGGAGGGGAGGGGEIVLTQSPATLSLSPGERATLSCRASQSVLSHLAWYQQKPGQAPRLLIYEAATRATGIPDRFSGSGSGTEFTLTISRLEPEDFAVYYCQQYQNWPLTFGGGTKVEIKRTVAAPSVFIFPPSDEQLKSGTASVVCLLNNFYPREAKVQWKVDNALQSGNSQESVTEQDSKDSTYSLSSTLTLSKADYEKHKVYACEVTHQGLSSPVTKSFNRGEC

SEQ ID NO: 3634 - protein, 264 aa, synthetic construct
  REGION 1..264: note = source = /note="Description of Artificial Sequence: Synthetic polypeptide"
HSEGTFTSDVSSYLEEQAAKEFIEWLKNVGGGGGGAGGGGAGGGGAGGGGEIVLTQSPATLSLSPGERATLSCRASQSVDLHLAWYQQKPGQAPRLLIYEAATRATGIPDRFSGSGSGTEFTLTISRLEPEDFAVYYCQQYQNWPLTFGGGTKVEIKRTVAAPSVFIFPPSDEQLKSGTASVVCLLNNFYPREAKVQWKVDNALQSGNSQESVTEQDSKDSTYSLSSTLTLSKADYEKHKVYACEVTHQGLSSPVTKSFNRGEC

SEQ ID NO: 3635 - protein, 264 aa, synthetic construct
  REGION 1..264: note = source = /note="Description of Artificial Sequence: Synthetic polypeptide"
HGEGTFTSDVSSYLEEQAAKEFIEWLKQGGGGGGGAGGGGAGGGGAGGGGEIVMTQSPATLSVSPGERATLSCRASQSVSSNLAWYQQKPGQAPRLLIYGAATRATGIPARFSGSGSGTEFTLTISSLQSEDFAVYYCQQYNNWPLTFGGGTKVEIKRTVAAPSVFIFPPSDEQLKSGTASVVCLLNNFYPREAKVQWKVDNALQSGNSQESVTEQDSKDSTYSLSSTLTLSKADYEKHKVYACEVTHQGLSSPVTKSFNRGEC

SEQ ID NO: 3636 - protein, 264 aa, synthetic construct
  REGION 1..264: note = source = /note="Description of Artificial Sequence: Synthetic polypeptide"
HGEGTFTSDVSSYLEEQAAKEFIEWLKQGGGGGGGAGGGGAGGGGAGGGGEIVMTQSPATLSVSPGERATLSCRASQSVDLHLAWYQQKPGQAPRLLIYEAATRATGIPARFSGSGSGTEFTLTISSLQSEDFAVYYCQQYQNWPLTFGGGTKVEIKRTVAAPSVFIFPPSDEQLKSGTASVVCLLNNFYPREAKVQWKVDNALQSGNSQESVTEQDSKDSTYSLSSTLTLSKADYEKHKVYACEVTHQGLSSPVTKSFNRGEC

SEQ ID NO: 3637 - protein, 264 aa, synthetic construct
  REGION 1..264: note = source = /note="Description of Artificial Sequence: Synthetic polypeptide"
HGEGTFTSDVSSYLEEQAAKEFIEWLKQGGGGGGGAGGGGAGGGGAGGGGEIVLTQSPATLSLSPGERATLSCRASQSVSSNLAWYQQKPGQAPRLLIYGAATRATGIPDRFSGSGSGTEFTLTISRLEPEDFAVYYCQQYNNWPLTFGGGTKVEIKRTVAAPSVFIFPPSDEQLKSGTASVVCLLNNFYPREAKVQWKVDNALQSGNSQESVTEQDSKDSTYSLSSTLTLSKADYEKHKVYACEVTHQGLSSPVTKSFNRGEC

SEQ ID NO: 3638 - protein, 264 aa, synthetic construct
  REGION 1..264: note = source = /note="Description of Artificial Sequence: Synthetic polypeptide"
HGEGTFTSDVSSYLEEQAAKEFIEWLKQGGGGGGGAGGGGAGGGGAGGGGEIVLTQSPATLSLSPGERATLSCRASQSVLSHLAWYQQKPGQAPRLLIYEAATRATGIPDRFSGSGSGTEFTLTISRLEPEDFAVYYCQQYQNWPLTFGGGTKVEIKRTVAAPSVFIFPPSDEQLKSGTASVVCLLNNFYPREAKVQWKVDNALQSGNSQESVTEQDSKDSTYSLSSTLTLSKADYEKHKVYACEVTHQGLSSPVTKSFNRGEC

SEQ ID NO: 3639 - protein, 264 aa, synthetic construct
  REGION 1..264: note = source = /note="Description of Artificial Sequence: Synthetic polypeptide"
HGEGTFTSDVSSYLEEQAAKEFIEWLKQGGGGGGGAGGGGAGGGGAGGGGEIVLTQSPATLSLSPGERATLSCRASQSVDLHLAWYQQKPGQAPRLLIYEAATRATGIPDRFSGSGSGTEFTLTISRLEPEDFAVYYCQQYQNWPLTFGGGTKVEIKRTVAAPSVFIFPPSDEQLKSGTASVVCLLNNFYPREAKVQWKVDNALQSGNSQESVTEQDSKDSTYSLSSTLTLSKADYEKHKVYACEVTHQGLSSPVTKSFNRGEC

SEQ ID NO: 3640 - protein, 264 aa, synthetic construct
  REGION 1..264: note = source = /note="Description of Artificial Sequence: Synthetic polypeptide"
HSEGTFTSDVSSYLEEQAAKEFIEWLKQGGGGGGGAGGGGAGGGGAGGGGEIVMTQSPATLSVSPGERATLSCRASQSVSSNLAWYQQKPGQAPRLLIYGAATRATGIPARFSGSGSGTEFTLTISSLQSEDFAVYYCQQYNNWPLTFGGGTKVEIKRTVAAPSVFIFPPSDEQLKSGTASVVCLLNNFYPREAKVQWKVDNALQSGNSQESVTEQDSKDSTYSLSSTLTLSKADYEKHKVYACEVTHQGLSSPVTKSFNRGEC

SEQ ID NO: 3641 - protein, 264 aa, synthetic construct
  REGION 1..264: note = source = /note="Description of Artificial Sequence: Synthetic polypeptide"
HSEGTFTSDVSSYLEEQAAKEFIEWLKQGGGGGGGAGGGGAGGGGAGGGGEIVMTQSPATLSVSPGERATLSCRASQSVDLHLAWYQQKPGQAPRLLIYEAATRATGIPARFSGSGSGTEFTLTISSLQSEDFAVYYCQQYQNWPLTFGGGTKVEIKRTVAAPSVFIFPPSDEQLKSGTASVVCLLNNFYPREAKVQWKVDNALQSGNSQESVTEQDSKDSTYSLSSTLTLSKADYEKHKVYACEVTHQGLSSPVTKSFNRGEC

SEQ ID NO: 3642 - protein, 264 aa, synthetic construct
  REGION 1..264: note = source = /note="Description of Artificial Sequence: Synthetic polypeptide"
HSEGTFTSDVSSYLEEQAAKEFIEWLKQGGGGGGGAGGGGAGGGGAGGGGEIVLTQSPATLSLSPGERATLSCRASQSVSSNLAWYQQKPGQAPRLLIYGAATRATGIPDRFSGSGSGTEFTLTISRLEPEDFAVYYCQQYNNWPLTFGGGTKVEIKRTVAAPSVFIFPPSDEQLKSGTASVVCLLNNFYPREAKVQWKVDNALQSGNSQESVTEQDSKDSTYSLSSTLTLSKADYEKHKVYACEVTHQGLSSPVTKSFNRGEC

SEQ ID NO: 3643 - protein, 264 aa, synthetic construct
  REGION 1..264: note = source = /note="Description of Artificial Sequence: Synthetic polypeptide"
HSEGTFTSDVSSYLEEQAAKEFIEWLKQGGGGGGGAGGGGAGGGGAGGGGEIVLTQSPATLSLSPGERATLSCRASQSVLSHLAWYQQKPGQAPRLLIYEAATRATGIPDRFSGSGSGTEFTLTISRLEPEDFAVYYCQQYQNWPLTFGGGTKVEIKRTVAAPSVFIFPPSDEQLKSGTASVVCLLNNFYPREAKVQWKVDNALQSGNSQESVTEQDSKDSTYSLSSTLTLSKADYEKHKVYACEVTHQGLSSPVTKSFNRGEC

SEQ ID NO: 3644 - protein, 264 aa, synthetic construct
  REGION 1..264: note = source = /note="Description of Artificial Sequence: Synthetic polypeptide"
HSEGTFTSDVSSYLEEQAAKEFIEWLKQGGGGGGGAGGGGAGGGGAGGGGEIVLTQSPATLSLSPGERATLSCRASQSVDLHLAWYQQKPGQAPRLLIYEAATRATGIPDRFSGSGSGTEFTLTISRLEPEDFAVYYCQQYQNWPLTFGGGTKVEIKRTVAAPSVFIFPPSDEQLKSGTASVVCLLNNFYPREAKVQWKVDNALQSGNSQESVTEQDSKDSTYSLSSTLTLSKADYEKHKVYACEVTHQGLSSPVTKSFNRGEC

SEQ ID NO: 3645 - protein, 264 aa, synthetic construct
  REGION 1..264: note = source = /note="Description of Artificial Sequence: Synthetic polypeptide"
HGEGTFTSDVSSYLEEQAAKEFIEWLKNEGGGGGGAGGGGAGGGGAGGGGEIVMTQSPATLSVSPGERATLSCRASQSVLSHLAWYQQKPGQAPRLLIYEAATRATGIPARFSGSGSGTEFTLTISSLQSEDFAVYYCQQYQNWPLTFGGGTKVEIKRTVAAPSVFIFPPSDEQLKSGTASVVCLLNNFYPREAKVQWKVDNALQSGNSQESVTEQDSKDSTYSLSSTLTLSKADYEKHKVYACEVTHQGLSSPVTKSFNRGEC

SEQ ID NO: 3646 - protein, 264 aa, synthetic construct
  REGION 1..264: note = source = /note="Description of Artificial Sequence: Synthetic polypeptide"
HSEGTFTSDVSSYLEEQAAKEFIEWLKNEGGGGGGAGGGGAGGGGAGGGGEIVMTQSPATLSVSPGERATLSCRASQSVLSHLAWYQQKPGQAPRLLIYEAATRATGIPARFSGSGSGTEFTLTISSLQSEDFAVYYCQQYQNWPLTFGGGTKVEIKRTVAAPSVFIFPPSDEQLKSGTASVVCLLNNFYPREAKVQWKVDNALQSGNSQESVTEQDSKDSTYSLSSTLTLSKADYEKHKVYACEVTHQGLSSPVTKSFNRGEC

SEQ ID NO: 3647 - protein, 264 aa, synthetic construct
  REGION 1..264: note = source = /note="Description of Artificial Sequence: Synthetic polypeptide"
HGEGTFTSDVSSYLEEQAAKEFIEWLKNPGGGGGGAGGGGAGGGGAGGGGEIVMTQSPATLSVSPGERATLSCRASQSVLSHLAWYQQKPGQAPRLLIYEAATRATGIPARFSGSGSGTEFTLTISSLQSEDFAVYYCQQYQNWPLTFGGGTKVEIKRTVAAPSVFIFPPSDEQLKSGTASVVCLLNNFYPREAKVQWKVDNALQSGNSQESVTEQDSKDSTYSLSSTLTLSKADYEKHKVYACEVTHQGLSSPVTKSFNRGEC

SEQ ID NO: 3648 - protein, 264 aa, synthetic construct
  REGION 1..264: note = source = /note="Description of Artificial Sequence: Synthetic polypeptide"
HSEGTFTSDVSSYLEEQAAKEFIEWLKNPGGGGGGAGGGGAGGGGAGGGGEIVMTQSPATLSVSPGERATLSCRASQSVLSHLAWYQQKPGQAPRLLIYEAATRATGIPARFSGSGSGTEFTLTISSLQSEDFAVYYCQQYQNWPLTFGGGTKVEIKRTVAAPSVFIFPPSDEQLKSGTASVVCLLNNFYPREAKVQWKVDNALQSGNSQESVTEQDSKDSTYSLSSTLTLSKADYEKHKVYACEVTHQGLSSPVTKSFNRGEC

SEQ ID NO: 3649 - protein, 264 aa, synthetic construct
  REGION 1..264: note = source = /note="Description of Artificial Sequence: Synthetic polypeptide"
HGEGTFTSDVSSYLEEQAAKEFIEWLKNQGGGGGGAGGGGAGGGGAGGGGEIVMTQSPATLSVSPGERATLSCRASQSVLSHLAWYQQKPGQAPRLLIYEAATRATGIPARFSGSGSGTEFTLTISSLQSEDFAVYYCQQYQNWPLTFGGGTKVEIKRTVAAPSVFIFPPSDEQLKSGTASVVCLLNNFYPREAKVQWKVDNALQSGNSQESVTEQDSKDSTYSLSSTLTLSKADYEKHKVYACEVTHQGLSSPVTKSFNRGEC

SEQ ID NO: 3650 - protein, 264 aa, synthetic construct
  REGION 1..264: note = source = /note="Description of Artificial Sequence: Synthetic polypeptide"
HSEGTFTSDVSSYLEEQAAKEFIEWLKNQGGGGGGAGGGGAGGGGAGGGGEIVMTQSPATLSVSPGERATLSCRASQSVLSHLAWYQQKPGQAPRLLIYEAATRATGIPARFSGSGSGTEFTLTISSLQSEDFAVYYCQQYQNWPLTFGGGTKVEIKRTVAAPSVFIFPPSDEQLKSGTASVVCLLNNFYPREAKVQWKVDNALQSGNSQESVTEQDSKDSTYSLSSTLTLSKADYEKHKVYACEVTHQGLSSPVTKSFNRGEC

SEQ ID NO: 3651 - protein, 264 aa, synthetic construct
  REGION 1..264: note = source = /note="Description of Artificial Sequence: Synthetic polypeptide"
HGEGTFTSDVSSYLEEQAAKEFIEWLKNTGGGGGGAGGGGAGGGGAGGGGEIVMTQSPATLSVSPGERATLSCRASQSVLSHLAWYQQKPGQAPRLLIYEAATRATGIPARFSGSGSGTEFTLTISSLQSEDFAVYYCQQYQNWPLTFGGGTKVEIKRTVAAPSVFIFPPSDEQLKSGTASVVCLLNNFYPREAKVQWKVDNALQSGNSQESVTEQDSKDSTYSLSSTLTLSKADYEKHKVYACEVTHQGLSSPVTKSFNRGEC

SEQ ID NO: 3652 - protein, 264 aa, synthetic construct
  REGION 1..264: note = source = /note="Description of Artificial Sequence: Synthetic polypeptide"
HSEGTFTSDVSSYLEEQAAKEFIEWLKNTGGGGGGAGGGGAGGGGAGGGGEIVMTQSPATLSVSPGERATLSCRASQSVLSHLAWYQQKPGQAPRLLIYEAATRATGIPARFSGSGSGTEFTLTISSLQSEDFAVYYCQQYQNWPLTFGGGTKVEIKRTVAAPSVFIFPPSDEQLKSGTASVVCLLNNFYPREAKVQWKVDNALQSGNSQESVTEQDSKDSTYSLSSTLTLSKADYEKHKVYACEVTHQGLSSPVTKSFNRGEC

SEQ ID NO: 3653 - protein, 264 aa, synthetic construct
  REGION 1..264: note = source = /note="Description of Artificial Sequence: Synthetic polypeptide"
HGEGTFTSDVSSYLEEQAAKEFIEWLKNVGGGGGGAGGGGAGGGGAGGGGEIVMTQSPATLSVSPGERATLSCRASQSVLSHLAWYQQKPGQAPRLLIYEAATRATGIPARFSGSGSGTEFTLTISSLQSEDFAVYYCQQYQNWPLTFGGGTKVEIKRTVAAPSVFIFPPSDEQLKSGTASVVCLLNNFYPREAKVQWKVDNALQSGNSQESVTEQDSKDSTYSLSSTLTLSKADYEKHKVYACEVTHQGLSSPVTKSFNRGEC

SEQ ID NO: 3654 - protein, 264 aa, synthetic construct
  REGION 1..264: note = source = /note="Description of Artificial Sequence: Synthetic polypeptide"
HSEGTFTSDVSSYLEEQAAKEFIEWLKNVGGGGGGAGGGGAGGGGAGGGGEIVMTQSPATLSVSPGERATLSCRASQSVLSHLAWYQQKPGQAPRLLIYEAATRATGIPARFSGSGSGTEFTLTISSLQSEDFAVYYCQQYQNWPLTFGGGTKVEIKRTVAAPSVFIFPPSDEQLKSGTASVVCLLNNFYPREAKVQWKVDNALQSGNSQESVTEQDSKDSTYSLSSTLTLSKADYEKHKVYACEVTHQGLSSPVTKSFNRGEC

SEQ ID NO: 3655 - protein, 264 aa, synthetic construct
  REGION 1..264: note = source = /note="Description of Artificial Sequence: Synthetic polypeptide"
HGEGTFTSDVSSYLEEQAAKEFIEWLKQGGGGGGGAGGGGAGGGGAGGGGEIVMTQSPATLSVSPGERATLSCRASQSVLSHLAWYQQKPGQAPRLLIYEAATRATGIPARFSGSGSGTEFTLTISSLQSEDFAVYYCQQYQNWPLTFGGGTKVEIKRTVAAPSVFIFPPSDEQLKSGTASVVCLLNNFYPREAKVQWKVDNALQSGNSQESVTEQDSKDSTYSLSSTLTLSKADYEKHKVYACEVTHQGLSSPVTKSFNRGEC

SEQ ID NO: 3656 - protein, 264 aa, synthetic construct
  REGION 1..264: note = source = /note="Description of Artificial Sequence: Synthetic polypeptide"
HSEGTFTSDVSSYLEEQAAKEFIEWLKQGGGGGGGAGGGGAGGGGAGGGGEIVMTQSPATLSVSPGERATLSCRASQSVLSHLAWYQQKPGQAPRLLIYEAATRATGIPARFSGSGSGTEFTLTISSLQSEDFAVYYCQQYQNWPLTFGGGTKVEIKRTVAAPSVFIFPPSDEQLKSGTASVVCLLNNFYPREAKVQWKVDNALQSGNSQESVTEQDSKDSTYSLSSTLTLSKADYEKHKVYACEVTHQGLSSPVTKSFNRGEC

SEQ ID NO: 3657 - protein, 451 aa, synthetic construct; identical to SEQ ID NO: 499
  REGION 1..451: note = source = /note="Description of Artificial Sequence: Synthetic polypeptide"

SEQ ID NO: 3658 - protein, 451 aa, synthetic construct
  REGION 1..451: note = source = /note="Description of Artificial Sequence: Synthetic polypeptide"
QVQLVESGGGVVQPGRSLRLSCAASGFTFSNFGMHWVRQAPGKGLEWVAVIWYDGSNENYADSVKGRFTISRDNSKNTLYLHMNSLRAADTAVYYCARDGTIFGVVLGDYWGQGTLVTVSSASTKGPSVFPLAPSSKSTSGGTAALGCLVKDYFPEPVTVSWNSGALTSGVHTFPAVLQSSGLYSLSSVVTVPSSSLGTQTYICNVNHKPSNTKVDKKVEPKSCDKTHTCPPCPAPELLGGPSVFLFPPKPKDTLMISRTPEVTCVVVDVSHEDPCVKFNWYVDGVEVHNAKTKPCEEQYGSTYRCVSVLTVLHQDWLNGKEYKCKVSNKALPAPIEKTISKAKGQPREPQVYTLPPSREEMTKNQVSLTCLVKGFYPSDIAVEWESNGQPENNYKTTPPVLDSDGSFFLYSKLTVDKSRWQQGNVFSCSVMHEALHNHYTQKSLSLSPGK

SEQ ID NO: 3659 - protein, 451 aa, synthetic construct
  REGION 1..451: note = source = /note="Description of Artificial Sequence: Synthetic polypeptide"
QVQLVESGGGVVQPGRSLRLSCAASGFTFSNFGMHWVRQAPGKGLEWVAVIWYDGSNENYADSVKGRFTISRDNSKNTLYLHMNSLRAADTAVYYCARDGTIFGVVLGDYWGQGTLVTVSSASTKGPSVFPLAPSSKSTSGGTAALGCLVKDYFPEPVTVSWNSGALTSGVHTFPAVLQSSGLYSLSSVVTVPSSSLGTQTYICNVNHKPSNTKVDKKVEPKSCDKTHTCPPCPAPELLGGPSVFLFPPKPKDTLMISRTPEVTCVVVDVSHEDPEVKFNWYVDGVEVHNAKTKPCEEQYGSTYRCVSVLTVLHQDWLNGKEYKCKVSNKALPAPIEKTISKAKGQPREPQVYTLPPSREEMCKNQVSLTCLVKGFYPSDIAVEWESNGQPENNYKTTPPVLDSDGSFFLYSKLTVDKSRWQQGNVFSCSVMHEALHNHYTQKSLSLSPGK

SEQ ID NO: 3660 - protein, 451 aa, synthetic construct; identical to SEQ ID NO: 612
  REGION 1..451: note = source = /note="Description of Artificial Sequence: Synthetic polypeptide"

SEQ ID NO: 3661 - protein, 451 aa, synthetic construct
  REGION 1..451: note = source = /note="Description of Artificial Sequence: Synthetic polypeptide"
EVQLVESGGGVVQPGRSLRLSCTASGFTFSSYGIHWVRQAPGKGLEWVAVIWYDGSNKFHADSVKGRFTISRDNSKNTLYLQMNSLRAEDSAMYFCARGKVAGMPEAFEIWGQGTKVTVSSASTKGPSVFPLAPSSKSTSGGTAALGCLVKDYFPEPVTVSWNSGALTSGVHTFPAVLQSSGLYSLSSVVTVPSSSLGTQTYICNVNHKPSNTKVDKKVEPKSCDKTHTCPPCPAPELLGGPSVFLFPPKPKDTLMISRTPEVTCVVVDVSHEDPEVKFNWYVDGVEVHNAKTKPCEEQYGSTYRCVSVLTVLHQDWLNGKEYKCKVSNKALPAPIEKTISKAKGQPREPQVYTLPPSREEMTKNQVSLTCLVKGFYPSDIAVEWESNGQPENNYKTTPPVLDSDGSFFLYSKLTVDKSRWQQGNVFSCSVMHEALHNHYTQKSLSLSPGK

SEQ ID NO: 3662 - protein, 451 aa, synthetic construct
  REGION 1..451: note = source = /note="Description of Artificial Sequence: Synthetic polypeptide"
QVQLVESGGGVVQPGRSLRLSCTASGFTFSSYGIHWVRQAPGKGLEWVAVIWYDGSNKFHADSVKGRFTISRDNSKNTLYLQMNSLRAEDSAMYFCARGKVAGMPEAFEIWGQGTKVTVSSASTKGPSVFPLAPSSKSTSGGTAALGCLVKDYFPEPVTVSWNSGALTSGVHTFPAVLQSSGLYSLSSVVTVPSSSLGTQTYICNVNHKPSNTKVDKKVEPKSCDKTHTCPPCPAPELLGGPSVFLFPPKPKDTLMISRTPEVTCVVVDVSHEDPCVKFNWYVDGVEVHNAKTKPCEEQYGSTYRCVSVLTVLHQDWLNGKEYKCKVSNKALPAPIEKTISKAKGQPREPQVYTLPPSREEMTKNQVSLTCLVKGFYPSDIAVEWESNGQPENNYKTTPPVLDSDGSFFLYSKLTVDKSRWQQGNVFSCSVMHEALHNHYTQKSLSLSPGK

SEQ ID NO: 3663 - protein, 451 aa, synthetic construct
  REGION 1..451: note = source = /note="Description of Artificial Sequence: Synthetic polypeptide"
QVQLVESGGGVVQPGRSLRLSCTASGFTFSSYGIHWVRQAPGKGLEWVAVIWYDGSNKFHADSVKGRFTISRDNSKNTLYLQMNSLRAEDSAMYFCARGKVAGMPEAFEIWGQGTKVTVSSASTKGPSVFPLAPSSKSTSGGTAALGCLVKDYFPEPVTVSWNSGALTSGVHTFPAVLQSSGLYSLSSVVTVPSSSLGTQTYICNVNHKPSNTKVDKKVEPKSCDKTHTCPPCPAPELLGGPSVFLFPPKPKDTLMISRTPEVTCVVVDVSHEDPEVKFNWYVDGVEVHNAKTKPCEEQYGSTYRCVSVLTVLHQDWLNGKEYKCKVSNKALPAPIEKTISKAKGQPREPQVYTLPPSREEMCKNQVSLTCLVKGFYPSDIAVEWESNGQPENNYKTTPPVLDSDGSFFLYSKLTVDKSRWQQGNVFSCSVMHEALHNHYTQKSLSLSPGK

SEQ ID NO: 3664 - protein, 451 aa, synthetic construct
  REGION 1..451: note = source = /note="Description of Artificial Sequence: Synthetic polypeptide"
EVQLVESGGGVVQPGRSLRLSCAASGFTFSNFGMHWVRQAPGKGLEWVAVIWYDGSNENYADSVKGRFTISRDNSKNTLYLHMNSLRAADTAVYYCARDGTIFGVVLGDYWGQGTLVTVSSASTKGPSVFPLAPSSKSTSGGTAALGCLVKDYFPEPVTVSWNSGALTSGVHTFPAVLQSSGLYSLSSVVTVPSSSLGTQTYICNVNHKPSNTKVDKKVEPKSCDKTHTCPPCPAPELLGGPSVFLFPPKPKDTLMISRTPEVTCVVVDVSHEDPEVKFNWYVDGVEVHNAKTKPCEEQYGSTYRCVSVLTVLHQDWLNGKEYKCKVSNKALPAPIEKTISKAKGQPREPQVYTLPPSREEMTKNQVSLTCLVKGFYPSDIAVEWESNGQPENNYKTTPPVLDSDGSFFLYSKLTVDKSRWQQGNVFSCSVMHEALHNHYTQKSLSLSPGK

SEQ ID NO: 3665 - protein, 451 aa, synthetic construct; identical to SEQ ID NO: 474
  REGION 1..451: note = source = /note="Description of Artificial Sequence: Synthetic polypeptide"

SEQ ID NO: 3666 - protein, 214 aa, synthetic construct; identical to SEQ ID NO: 316
  REGION 1..214: note = source = /note="Description of Artificial Sequence: Synthetic polypeptide"

SEQ ID NO: 3667 - protein, 451 aa, synthetic construct; identical to SEQ ID NO: 612
  REGION 1..451: note = source = /note="Description of Artificial Sequence: Synthetic polypeptide"

SEQ ID NO: 3668 - protein, 214 aa, synthetic construct; identical to SEQ ID NO: 455
  REGION 1..214: note = source = /note="Description of Artificial Sequence: Synthetic polypeptide"

SEQ ID NO: 3669 - protein, 451 aa, synthetic construct; identical to SEQ ID NO: 499
  REGION 1..451: note = source = /note="Description of Artificial Sequence: Synthetic polypeptide"

SEQ ID NO: 3670 - protein, 214 aa, synthetic construct; identical to SEQ ID NO: 342
  REGION 1..214: note = source = /note="Description of Artificial Sequence: Synthetic polypeptide"

SEQ ID NO: 3671 - protein, 214 aa, synthetic construct
  REGION 1..214: note = source = /note="Description of Artificial Sequence: Synthetic polypeptide"
DIQMTQSPSSVSASVGDRVTITCRASQGISRRLAWYQQKPGKAPKLLIYAASSLQSGVPSRFSGSGSGTDFTLTISSLQPEDFATYYCQQANSFPFTFGPGTKVDIKRTVAAPSVFIFPPSDEQLKSGTASVVCLLNNFYPREAKVQWKVDNALQSGNSQESVTEQDSKDSTYSLSSTLTLSKADYEKHKVYACEVTHQGLSSPVTKSFNRGEC

SEQ ID NO: 3672 - protein, 451 aa, synthetic construct
  REGION 1..451: note = source = /note="Description of Artificial Sequence: Synthetic polypeptide"
QVQLVESGGGVVQPGRSLRLSCAASGFTLSSYGMHWVRQAPGKGLEWVAVIWYDGSNKYYADSVKGRFTISRDNSKNTLYLQMNSLRAEDTAVYYCARGGGSGSYRYYYYGLDVWGQGTTVTVSSASTKGPSVFPLAPCSRSTSESTAALGCLVKDYFPEPVTVSWNSGALTSGVHTFPAVLQSSGLYSLSSVVTVPSSNFGTQTYTCNVDHKPSNTKVDKTVERKCCVECPPCPAPPVAGPSVFLFPPKPKDTLMISRTPEVTCVVVDVSHEDPEVQFNWYVDGVEVHNAKTKPREEQFNSTFRVVSVLTVVHQDWLNGKEYKCKVSNKGLPAPIEKTISKTKGQPREPQVYTLPPSREEMTKNQVSLTCLVKGFYPSDIAVEWESNGQPENNYKTTPPMLDSDGSFFLYSKLTVDKSRWQQGNVFSCSVMHEALHNHYTQKSLSLSPGK

SEQ ID NO: 3673 - protein, 451 aa, synthetic construct; identical to SEQ ID NO: 3672
  REGION 1..451: note = source = /note="Description of Artificial Sequence: Synthetic polypeptide"

SEQ ID NO: 3674 - protein, 451 aa, synthetic construct; identical to SEQ ID NO: 3672
  REGION 1..451: note = source = /note="Description of Artificial Sequence: Synthetic polypeptide"

SEQ ID NO: 3675 - protein, 451 aa, synthetic construct; identical to SEQ ID NO: 3672
  REGION 1..451: note = source = /note="Description of Artificial Sequence: Synthetic polypeptide"

SEQ ID NO: 3676 - protein, 220 aa, synthetic construct
  REGION 1..220: note = source = /note="Description of Artificial Sequence: Synthetic polypeptide"
DIVMTQSPSSLAMSVGQKVTMSCKSSQSLLNSSNQKNYLAWYQQKPGQSPKLLIYFASTRESGVPDRFIGSGSGTDFTLTISSVQAEDLADYFCQQHYYTPYTFGGGTKLEIKRTVAAPSVFIFPPSDEQLKSGTASVVCLLNNFYPREAKVQWKVDNALQSGNSQESVTEQDSKDSTYSLSSTLTLSKADYEKHKVYACEVTHQGLSSPVTKSFNRGEC

SEQ ID NO: 3677 - protein, 451 aa, synthetic construct; identical to SEQ ID NO: 474
  REGION 1..451: note = source = /note="Description of Artificial Sequence: Synthetic polypeptide"

SEQ ID NO: 3678 - protein, 451 aa, synthetic construct
  REGION 1..451: note = source = /note="Description of Artificial Sequence: Synthetic polypeptide"
QVQLVESGGGVVQPGRSLRLSCAASGFTFSYFGMHWVRQAPGKGLEWVAVIWYDGSNKYYADSVKGRFTISRDNSKNTLYLQMNSLRAEDTAVYYCARDGTIFGVLLGDYWGQGTLVTVSSASTKGPSVFPLAPSSKSTSGGTAALGCLVKDYFPEPVTVSWNSGALTSGVHTFPAVLQSSGLYSLSSVVTVPSSSLGTQTYICNVNHKPSNTKVDKKVEPKSCDKTHTCPPCPAPELLGGPSVFLFPPKPKDTLMISRTPEVTCVVVDVSHEDPEVKFNWYVDGVEVHNAKTKPCEEQYGSTYRCVSVLTVLHQDWLNGKEYKCKVSNKALPAPIEKTISKAKGQPREPQVYTLPPSREEMCKNQVSLTCLVKGFYPSDIAVEWESNGQPENNYKTTPPVLDSDGSFFLYSKLTVDKSRWQQGNVFSCSVMHEALHNHYTQKSLSLSPGK

SEQ ID NO: 3679 - protein, 451 aa, synthetic construct
  REGION 1..451: note = source = /note="Description of Artificial Sequence: Synthetic polypeptide"
QVQLVESGGGVVQPGRSLRLSCAASGFTFSYFGMHWVRQAPGKGLEWVAVIWYDGSNKYYADSVKGRFTISRDNSKNTLYLQMNSLRAEDTAVYYCARDGTIFGVLLGDYWGQGTLVTVSSASTKGPSVFPLAPSSKSTSGGTAALGCLVKDYFPEPVTVSWNSGALTSGVHTFPAVLQSSGLYSLSSVVTVPSSSLGTQTYICNVNHKPSNTKVDKKVEPKSCDKTHTCPPCPAPELLGGPSVFLFPPKPKDTLMISRTPEVTCVVVDVSHEDPCVKFNWYVDGVEVHNAKTKPCEEQYGSTYRCVSVLTVLHQDWLNGKEYKCKVSNKALPAPIEKTISKAKGQPREPQVYTLPPSREEMTKNQVSLTCLVKGFYPSDIAVEWESNGQPENNYKTTPPVLDSDGSFFLYSKLTVDKSRWQQGNVFSCSVMHEALHNHYTQKSLSLSPGK

SEQ ID NO: 3680 - protein, 214 aa, synthetic construct
  REGION 1..214: note = source = /note="Description of Artificial Sequence: Synthetic polypeptide"
DIQMTQSPSSLSASEGDRVTITCRASQGIRNDLGWYQQKPGKAPKRLIYAASSLQSGVPLRFSGSGSGTEFTLTISSLQPEDFATYYCLQYNSYPWTFGQGTKVEIKRTVAAPSVFIFPPSDEQLKSGTASVVCLLNNFYPREAKVQWKVDNALQSGNSQESVTEQDSKDSTYSLSSTLTLSKADYEKHKVYACEVTHQGLSSPVTKSFNRGEC

SEQ ID NO: 3681 - protein, 214 aa, synthetic construct; identical to SEQ ID NO: 3680
  REGION 1..214: note = source = /note="Description of Artificial Sequence: Synthetic polypeptide"

SEQ ID NO: 3682 - protein, 215 aa, synthetic construct
  REGION 1..215: note = source = /note="Description of Artificial Sequence: Synthetic polypeptide"
EIVLTQSPGTLSLSPGERATLSCRASQGISRSELAWYQQKPGQAPSLLIYGASSRATGIPDRFSGSGSGTDFTLTISRLEPEDFAVYYCQQFGSSPWTFGQGTKVEIKRTVAAPSVFIFPPSDEQLKSGTASVVCLLNNFYPREAKVQWKVDNALQSGNSQESVTEQDSKDSTYSLSSTLTLSKADYEKHKVYACEVTHQGLSSPVTKSFNRGEC

SEQ ID NO: 3683 - protein, 215 aa, synthetic construct; identical to SEQ ID NO: 3682
  REGION 1..215: note = source = /note="Description of Artificial Sequence: Synthetic polypeptide"

SEQ ID NO: 3684 - protein, 214 aa, synthetic construct; identical to SEQ ID NO: 316
  REGION 1..214: note = source = /note="Description of Artificial Sequence: Synthetic polypeptide"

SEQ ID NO: 3685 - protein, 214 aa, synthetic construct; identical to SEQ ID NO: 316
  REGION 1..214: note = source = /note="Description of Artificial Sequence: Synthetic polypeptide"

SEQ ID NO: 3686 - protein, 214 aa, synthetic construct; identical to SEQ ID NO: 316
  REGION 1..214: note = source = /note="Description of Artificial Sequence: Synthetic polypeptide"

SEQ ID NO: 3687 - protein, 214 aa, synthetic construct; identical to SEQ ID NO: 316
  REGION 1..214: note = source = /note="Description of Artificial Sequence: Synthetic polypeptide"

SEQ ID NO: 3688 - protein, 214 aa, synthetic construct; identical to SEQ ID NO: 316
  REGION 1..214: note = source = /note="Description of Artificial Sequence: Synthetic polypeptide"

SEQ ID NO: 3689 - protein, 214 aa, synthetic construct; identical to SEQ ID NO: 316
  REGION 1..214: note = source = /note="Description of Artificial Sequence: Synthetic polypeptide"

SEQ ID NO: 3690 - protein, 214 aa, synthetic construct; identical to SEQ ID NO: 316
  REGION 1..214: note = source = /note="Description of Artificial Sequence: Synthetic polypeptide"

SEQ ID NO: 3691 - protein, 214 aa, synthetic construct; identical to SEQ ID NO: 316
  REGION 1..214: note = source = /note="Description of Artificial Sequence: Synthetic polypeptide"

SEQ ID NO: 3692 - protein, 214 aa, synthetic construct; identical to SEQ ID NO: 316
  REGION 1..214: note = source = /note="Description of Artificial Sequence: Synthetic polypeptide"

SEQ ID NO: 3693 - protein, 214 aa, synthetic construct; identical to SEQ ID NO: 316
  REGION 1..214: note = source = /note="Description of Artificial Sequence: Synthetic polypeptide"

SEQ ID NO: 3694 - protein, 214 aa, synthetic construct; identical to SEQ ID NO: 316
  REGION 1..214: note = source = /note="Description of Artificial Sequence: Synthetic polypeptide"

SEQ ID NO: 3695 - protein, 214 aa, synthetic construct; identical to SEQ ID NO: 316
  REGION 1..214: note = source = /note="Description of Artificial Sequence: Synthetic polypeptide"

SEQ ID NO: 3696 - protein, 214 aa, synthetic construct; identical to SEQ ID NO: 316
  REGION 1..214: note = source = /note="Description of Artificial Sequence: Synthetic polypeptide"

SEQ ID NO: 3697 - protein, 214 aa, synthetic construct; identical to SEQ ID NO: 316
  REGION 1..214: note = source = /note="Description of Artificial Sequence: Synthetic polypeptide"

SEQ ID NO: 3698 - protein, 214 aa, synthetic construct; identical to SEQ ID NO: 316
  REGION 1..214: note = source = /note="Description of Artificial Sequence: Synthetic polypeptide"

SEQ ID NO: 3699 - protein, 214 aa, synthetic construct; identical to SEQ ID NO: 316
  REGION 1..214: note = source = /note="Description of Artificial Sequence: Synthetic polypeptide"

SEQ ID NO: 3700 - protein, 214 aa, synthetic construct; identical to SEQ ID NO: 324
  REGION 1..214: note = source = /note="Description of Artificial Sequence: Synthetic polypeptide"

SEQ ID NO: 3701 - protein, 214 aa, synthetic construct; identical to SEQ ID NO: 324
  REGION 1..214: note = source = /note="Description of Artificial Sequence: Synthetic polypeptide"

SEQ ID NO: 3702 - protein, 214 aa, synthetic construct; identical to SEQ ID NO: 316
  REGION 1..214: note = source = /note="Description of Artificial Sequence: Synthetic polypeptide"

SEQ ID NO: 3703 - protein, 214 aa, synthetic construct; identical to SEQ ID NO: 316
  REGION 1..214: note = source = /note="Description of Artificial Sequence: Synthetic polypeptide"

SEQ ID NO: 3704 - protein, 214 aa, synthetic construct; identical to SEQ ID NO: 316
  REGION 1..214: note = source = /note="Description of Artificial Sequence: Synthetic polypeptide"

SEQ ID NO: 3705 - protein, 214 aa, synthetic construct; identical to SEQ ID NO: 316
  REGION 1..214: note = source = /note="Description of Artificial Sequence: Synthetic polypeptide"

SEQ ID NO: 3706 - protein, 214 aa, synthetic construct; identical to SEQ ID NO: 316
  REGION 1..214: note = source = /note="Description of Artificial Sequence: Synthetic polypeptide"

SEQ ID NO: 3707 - protein, 214 aa, synthetic construct; identical to SEQ ID NO: 316
  REGION 1..214: note = source = /note="Description of Artificial Sequence: Synthetic polypeptide"

SEQ ID NO: 3708 - protein, 214 aa, synthetic construct; identical to SEQ ID NO: 316
  REGION 1..214: note = source = /note="Description of Artificial Sequence: Synthetic polypeptide"

SEQ ID NO: 3709 - protein, 214 aa, synthetic construct; identical to SEQ ID NO: 316
  REGION 1..214: note = source = /note="Description of Artificial Sequence: Synthetic polypeptide"

SEQ ID NO: 3710 - protein, 269 aa, synthetic construct
  REGION 1..269: note = source = /note="Description of Artificial Sequence: Synthetic polypeptide"
HGEGTFTSDLSKQMEEEAVRLFAAQAAQQGGGGSGSATGGSGSVASSGSGSATGSAIQMTQSPSSVSASIGDRVTITCRASQNINNLLAWYQQKPGKAPKLLIYTASSLQSEVPSRFSGSGSGTDFTLTISSLQPEDFAIYCCQQAHRFPPTFGQGTKVEIRRTVAAPSVFIFPPSDEQLKSGTASVVCLLNNFYPREAKVQWKVDNALQSGNSQESVTEQDSKDSTYSLESTLTLSKADYEKHKVYACEVTHQGLSSPVTKSFNRGEC

SEQ ID NO: 3711 - protein, 269 aa, synthetic construct
  REGION 1..269: note = source = /note="Description of Artificial Sequence: Synthetic polypeptide"
HGEGTFTSDLSKQMEEEAVRLFAAQAAQQGGGGSGSATGGSGSVASSGSGSATGSAIQMTQSPSSVSASIGDRVTITCRASQNINNLLAWYQEKPGKAPKLLIYTASSLQSEVPSRFSGSGSGTDFTLTISSLQPEDFAIYCCQQAHRFPPTFGQGTKVEIRRTVAAPSVFIFPPSDEQLKSGTASVVCLLNNFYPREAKVQWKVDNALQSGNSQESVTEQDSKDSTYSLESTLTLSKADYEKHKVYACEVTHQGLSSPVTKSFNRGEC

SEQ ID NO: 3712 - protein, 269 aa, synthetic construct
  REGION 1..269: note = source = /note="Description of Artificial Sequence: Synthetic polypeptide"
HGEGTFTSDLSKQMEEEAVRLFAAQAAQQGGGGSGSATGGSGSVASSGSGSATGSAIQMTQSPSSVSASIGDRVTITCRASQNINNLLAWYQQKPGKAPKLLIYTASSLQSEVPSRFSGSGSGTDFTLTISSLQPEDFAIYCCQQAHRFPPTFGEGTKVEIRRTVAAPSVFIFPPSDEQLKSGTASVVCLLNNFYPREAKVQWKVDNALQSGNSQESVTEQDSKDSTYSLESTLTLSKADYEKHKVYACEVTHQGLSSPVTKSFNRGEC

SEQ ID NO: 3713 - protein, 269 aa, synthetic construct
  REGION 1..269: note = source = /note="Description of Artificial Sequence: Synthetic polypeptide"
HGEGTFTSDLSKQMEEEAVRLFAAQAAQQGGGGSGSATGGSGSVASSGSGSATGSAIQMTQSPSSVSASIGDRVTITCRASQNINNLLAWYQQKPGKAPKLLIYTASSLQSEVPSRFSGSGSGTDFTLTISSLQPEDFAIYYCQQAHRFPPTFGQGTKVEIRRTVAAPSVFIFPPSDEQLKSGTASVVCLLNNFYPREAKVQWKVDNALQSGNSQESVTEQDSKDSTYSLESTLTLSKADYEKHKVYACEVTHQGLSSPVTKSFNRGEC

SEQ ID NO: 3714 - protein, 269 aa, synthetic construct
  REGION 1..269: note = source = /note="Description of Artificial Sequence: Synthetic polypeptide"
HGEGTFTSDLSKQMEEEAVRLFAAQAAQQGGGGSGSATGGSGSVASSGSGSATGSAIQMTQSPSSVSASIGDRVTITCRASQNINNLLAWYQEKPGKAPKLLIYTASSLQSEVPSRFSGSGSGTDFTLTISSLQPEDFAIYYCQQAHRFPPTFGQGTKVEIRRTVAAPSVFIFPPSDEQLKSGTASVVCLLNNFYPREAKVQWKVDNALQSGNSQESVTEQDSKDSTYSLESTLTLSKADYEKHKVYACEVTHQGLSSPVTKSFNRGEC

SEQ ID NO: 3715 - protein, 269 aa, synthetic construct
  REGION 1..269: note = source = /note="Description of Artificial Sequence: Synthetic polypeptide"
HGEGTFTSDLSKQMEEEAVRLFAAQAAQQGGGGSGSATGGSGSVASSGSGSATGSAIQMTQSPSSVSASIGDRVTITCRASQNINNLLAWYQQKPGKAPKLLIYTASSLQSEVPSRFSGSGSGTDFTLTISSLQPEDFAIYYCQQAHRFPPTFGEGTKVEIRRTVAAPSVFIFPPSDEQLKSGTASVVCLLNNFYPREAKVQWKVDNALQSGNSQESVTEQDSKDSTYSLESTLTLSKADYEKHKVYACEVTHQGLSSPVTKSFNRGEC

SEQ ID NO: 3716 - protein, 269 aa, synthetic construct
  REGION 1..269: note = source = /note="Description of Artificial Sequence: Synthetic polypeptide"
HGEGTFTSDLSKQMEEEAVRLFAAQAAQQGGGGSGSATGGSGSVASSGSGSATGSAIQMTQSPSSVSASIGDRVTITCRASQNINNLLAWYQQKPGKAPKLLIYTASSLQSEVPSRFSGSGSGTDFTLTISSLQPEDFAIYSCQQAHRFPPTFGQGTKVEIRRTVAAPSVFIFPPSDEQLKSGTASVVCLLNNFYPREAKVQWKVDNALQSGNSQESVTEQDSKDSTYSLESTLTLSKADYEKHKVYACEVTHQGLSSPVTKSFNRGEC

SEQ ID NO: 3717 - protein, 269 aa, synthetic construct
  REGION 1..269: note = source = /note="Description of Artificial Sequence: Synthetic polypeptide"
HGEGTFTSDLSKQMEEEAVRLFAAQAAQQGGGGSGSATGGSGSVASSGSGSATGSAIQMTQSPSSVSASIGDRVTITCRASQNINNLLAWYQEKPGKAPKLLIYTASSLQSEVPSRFSGSGSGTDFTLTISSLQPEDFAIYSCQQAHRFPPTFGQGTKVEIRRTVAAPSVFIFPPSDEQLKSGTASVVCLLNNFYPREAKVQWKVDNALQSGNSQESVTEQDSKDSTYSLESTLTLSKADYEKHKVYACEVTHQGLSSPVTKSFNRGEC

SEQ ID NO: 3718 - protein, 269 aa, synthetic construct
  REGION 1..269: note = source = /note="Description of Artificial Sequence: Synthetic polypeptide"
HGEGTFTSDLSKQMEEEAVRLFAAQAAQQGGGGSGSATGGSGSVASSGSGSATGSAIQMTQSPSSVSASIGDRVTITCRASQNINNLLAWYQQKPGKAPKLLIYTASSLQSEVPSRFSGSGSGTDFTLTISSLQPEDFAIYSCQQAHRFPPTFGEGTKVEIRRTVAAPSVFIFPPSDEQLKSGTASVVCLLNNFYPREAKVQWKVDNALQSGNSQESVTEQDSKDSTYSLESTLTLSKADYEKHKVYACEVTHQGLSSPVTKSFNRGEC

SEQ ID NO: 3719 - protein, 269 aa, synthetic construct; identical to SEQ ID NO: 3710
  REGION 1..269: note = source = /note="Description of Artificial Sequence: Synthetic polypeptide"

SEQ ID NO: 3720 - protein, 269 aa, synthetic construct; identical to SEQ ID NO: 3711
  REGION 1..269: note = source = /note="Description of Artificial Sequence: Synthetic polypeptide"

SEQ ID NO: 3721 - protein, 269 aa, synthetic construct; identical to SEQ ID NO: 3712
  REGION 1..269: note = source = /note="Description of Artificial Sequence: Synthetic polypeptide"

SEQ ID NO: 3722 - protein, 269 aa, synthetic construct; identical to SEQ ID NO: 3713
  REGION 1..269: note = source = /note="Description of Artificial Sequence: Synthetic polypeptide"

SEQ ID NO: 3723 - protein, 269 aa, synthetic construct; identical to SEQ ID NO: 3714
  REGION 1..269: note = source = /note="Description of Artificial Sequence: Synthetic polypeptide"

SEQ ID NO: 3724 - protein, 269 aa, synthetic construct; identical to SEQ ID NO: 3715
  REGION 1..269: note = source = /note="Description of Artificial Sequence: Synthetic polypeptide"

SEQ ID NO: 3725 - protein, 269 aa, synthetic construct; identical to SEQ ID NO: 3716
  REGION 1..269: note = source = /note="Description of Artificial Sequence: Synthetic polypeptide"

SEQ ID NO: 3726 - protein, 269 aa, synthetic construct; identical to SEQ ID NO: 3717
  REGION 1..269: note = source = /note="Description of Artificial Sequence: Synthetic polypeptide"

SEQ ID NO: 3727 - protein, 269 aa, synthetic construct; identical to SEQ ID NO: 3718
  REGION 1..269: note = source = /note="Description of Artificial Sequence: Synthetic polypeptide"

SEQ ID NO: 3728 - protein, 450 aa, synthetic construct
  REGION 1..450: note = source = /note="Description of Artificial Sequence: Synthetic polypeptide"
QVQLVESGGGVVQPGRSLRLSCAASGFTFSNYGMHWVRQAPGEGLEWVAAIWFDASDKYYADAVKGRFTISRDNSKNTLYLQMNSLRAEDTAVYYCARDQAIFGVVPDYWGQGTLVTVSSASTKGPSVFPLAPSSKSTSGGTAALGCLVKDYFPEPVTVSWNSGALTSGVHTFPAVLQSSGLYSLESVVTVPSSSLGTQTYICNVNHKPSNTKVDKKVEPKSCDKTHTCPPCPAPELLGGPSVFLFPPKPKDTLMISRTPEVTCVVVDVSHEDPEVKFNWYVDGVEVHNAKTKPCEEQYGSTYRCVSVLTVLHQDWLNGKEYKCKVSNKALPAPIEKTISKAKGQPREPQVYTLPPSRKEMTKNQVSLTCLVKGFYPSDIAVEWESNGQPENNYKTTPPVLKSDGSFFLYSKLTVDKSRWQQGNVFSCSVMHEALHNHYTQKSLSLSPGK

SEQ ID NO: 3729 - protein, 450 aa, synthetic construct; identical to SEQ ID NO: 3728
  REGION 1..450: note = source = /note="Description of Artificial Sequence: Synthetic polypeptide"

SEQ ID NO: 3730 - protein, 450 aa, synthetic construct; identical to SEQ ID NO: 3728
  REGION 1..450: note = source = /note="Description of Artificial Sequence: Synthetic polypeptide"

SEQ ID NO: 3731 - protein, 450 aa, synthetic construct; identical to SEQ ID NO: 3728
  REGION 1..450: note = source = /note="Description of Artificial Sequence: Synthetic polypeptide"

SEQ ID NO: 3732 - protein, 450 aa, synthetic construct; identical to SEQ ID NO: 3728
  REGION 1..450: note = source = /note="Description of Artificial Sequence: Synthetic polypeptide"

SEQ ID NO: 3733 - protein, 450 aa, synthetic construct; identical to SEQ ID NO: 3728
  REGION 1..450: note = source = /note="Description of Artificial Sequence: Synthetic polypeptide"

SEQ ID NO: 3734 - protein, 450 aa, synthetic construct; identical to SEQ ID NO: 3728
  REGION 1..450: note = source = /note="Description of Artificial Sequence: Synthetic polypeptide"

SEQ ID NO: 3735 - protein, 450 aa, synthetic construct; identical to SEQ ID NO: 3728
  REGION 1..450: note = source = /note="Description of Artificial Sequence: Synthetic polypeptide"

SEQ ID NO: 3736 - protein, 450 aa, synthetic construct; identical to SEQ ID NO: 3728
  REGION 1..450: note = source = /note="Description of Artificial Sequence: Synthetic polypeptide"

SEQ ID NO: 3737 - protein, 450 aa, synthetic construct; identical to SEQ ID NO: 3728
  REGION 1..450: note = source = /note="Description of Artificial Sequence: Synthetic polypeptide"

SEQ ID NO: 3738 - protein, 450 aa, synthetic construct; identical to SEQ ID NO: 3728
  REGION 1..450: note = source = /note="Description of Artificial Sequence: Synthetic polypeptide"

SEQ ID NO: 3739 - protein, 450 aa, synthetic construct
  REGION 1..450: note = source = /note="Description of Artificial Sequence: Synthetic polypeptide"
QVQLVESGGGVVQPGRSLRLSCAASGFTFSNYGMHWVREAPGEGLEWVAAIWFDASDKYYADAVKGRFTISRDNSKNTLYLQMNSLRAEDTAVYYCARDQAIFGVVPDYWGQGTLVTVSSASTKGPSVFPLAPSSKSTSGGTAALGCLVKDYFPEPVTVSWNSGALTSGVHTFPAVLQSSGLYSLESVVTVPSSSLGTQTYICNVNHKPSNTKVDKKVEPKSCDKTHTCPPCPAPELLGGPSVFLFPPKPKDTLMISRTPEVTCVVVDVSHEDPEVKFNWYVDGVEVHNAKTKPCEEQYGSTYRCVSVLTVLHQDWLNGKEYKCKVSNKALPAPIEKTISKAKGQPREPQVYTLPPSRKEMTKNQVSLTCLVKGFYPSDIAVEWESNGQPENNYKTTPPVLKSDGSFFLYSKLTVDKSRWQQGNVFSCSVMHEALHNHYTQKSLSLSPGK

SEQ ID NO: 3740 - protein, 450 aa, synthetic construct; identical to SEQ ID NO: 3739
  REGION 1..450: note = source = /note="Description of Artificial Sequence: Synthetic polypeptide"

SEQ ID NO: 3741 - protein, 450 aa, synthetic construct; identical to SEQ ID NO: 3739
  REGION 1..450: note = source = /note="Description of Artificial Sequence: Synthetic polypeptide"

SEQ ID NO: 3742 - protein, 450 aa, synthetic construct; identical to SEQ ID NO: 3739
  REGION 1..450: note = source = /note="Description of Artificial Sequence: Synthetic polypeptide"

SEQ ID NO: 3743 - protein, 450 aa, synthetic construct; identical to SEQ ID NO: 3739
  REGION 1..450: note = source = /note="Description of Artificial Sequence: Synthetic polypeptide"

SEQ ID NO: 3744 - protein, 450 aa, synthetic construct; identical to SEQ ID NO: 3739
  REGION 1..450: note = source = /note="Description of Artificial Sequence: Synthetic polypeptide"

SEQ ID NO: 3745 - protein, 450 aa, synthetic construct; identical to SEQ ID NO: 3739
  REGION 1..450: note = source = /note="Description of Artificial Sequence: Synthetic polypeptide"

SEQ ID NO: 3746 - protein, 450 aa, synthetic construct; identical to SEQ ID NO: 3739
  REGION 1..450: note = source = /note="Description of Artificial Sequence: Synthetic polypeptide"

SEQ ID NO: 3747 - protein, 450 aa, synthetic construct; identical to SEQ ID NO: 3739
  REGION 1..450: note = source = /note="Description of Artificial Sequence: Synthetic polypeptide"

SEQ ID NO: 3748 - protein, 450 aa, synthetic construct; identical to SEQ ID NO: 3739
  REGION 1..450: note = source = /note="Description of Artificial Sequence: Synthetic polypeptide"

SEQ ID NO: 3749 - protein, 450 aa, synthetic construct; identical to SEQ ID NO: 3739
  REGION 1..450: note = source = /note="Description of Artificial Sequence: Synthetic polypeptide"

SEQ ID NO: 3750 - protein, 450 aa, synthetic construct
  REGION 1..450: note = source = /note="Description of Artificial Sequence: Synthetic polypeptide"
QVQLVESGGGVVQPGRSLRLSCAASGFTFSNYGMHWVRQAPGEELEWVAAIWFDASDKYYADAVKGRFTISRDNSKNTLYLQMNSLRAEDTAVYYCARDQAIFGVVPDYWGQGTLVTVSSASTKGPSVFPLAPSSKSTSGGTAALGCLVKDYFPEPVTVSWNSGALTSGVHTFPAVLQSSGLYSLESVVTVPSSSLGTQTYICNVNHKPSNTKVDKKVEPKSCDKTHTCPPCPAPELLGGPSVFLFPPKPKDTLMISRTPEVTCVVVDVSHEDPEVKFNWYVDGVEVHNAKTKPCEEQYGSTYRCVSVLTVLHQDWLNGKEYKCKVSNKALPAPIEKTISKAKGQPREPQVYTLPPSRKEMTKNQVSLTCLVKGFYPSDIAVEWESNGQPENNYKTTPPVLKSDGSFFLYSKLTVDKSRWQQGNVFSCSVMHEALHNHYTQKSLSLSPGK

SEQ ID NO: 3751 - protein, 450 aa, synthetic construct; identical to SEQ ID NO: 3750
  REGION 1..450: note = source = /note="Description of Artificial Sequence: Synthetic polypeptide"

SEQ ID NO: 3752 - protein, 450 aa, synthetic construct; identical to SEQ ID NO: 3750
  REGION 1..450: note = source = /note="Description of Artificial Sequence: Synthetic polypeptide"

SEQ ID NO: 3753 - protein, 450 aa, synthetic construct; identical to SEQ ID NO: 3750
  REGION 1..450: note = source = /note="Description of Artificial Sequence: Synthetic polypeptide"

SEQ ID NO: 3754 - protein, 450 aa, synthetic construct; identical to SEQ ID NO: 3750
  REGION 1..450: note = source = /note="Description of Artificial Sequence: Synthetic polypeptide"

SEQ ID NO: 3755 - protein, 450 aa, synthetic construct; identical to SEQ ID NO: 3750
  REGION 1..450: note = source = /note="Description of Artificial Sequence: Synthetic polypeptide"

SEQ ID NO: 3756 - protein, 450 aa, synthetic construct; identical to SEQ ID NO: 3750
  REGION 1..450: note = source = /note="Description of Artificial Sequence: Synthetic polypeptide"

SEQ ID NO: 3757 - protein, 450 aa, synthetic construct; identical to SEQ ID NO: 3750
  REGION 1..450: note = source = /note="Description of Artificial Sequence: Synthetic polypeptide"

SEQ ID NO: 3758 - protein, 450 aa, synthetic construct; identical to SEQ ID NO: 3750
  REGION 1..450: note = source = /note="Description of Artificial Sequence: Synthetic polypeptide"

SEQ ID NO: 3759 - protein, 450 aa, synthetic construct; identical to SEQ ID NO: 3750
  REGION 1..450: note = source = /note="Description of Artificial Sequence: Synthetic polypeptide"

SEQ ID NO: 3760 - protein, 450 aa, synthetic construct; identical to SEQ ID NO: 3750
  REGION 1..450: note = source = /note="Description of Artificial Sequence: Synthetic polypeptide"

SEQ ID NO: 3761 - protein, 214 aa, synthetic construct; identical to SEQ ID NO: 389
  REGION 1..214: note = source = /note="Description of Artificial Sequence: Synthetic polypeptide"

SEQ ID NO: 3762 - protein, 214 aa, synthetic construct; identical to SEQ ID NO: 316
  REGION 1..214: note = source = /note="Description of Artificial Sequence: Synthetic polypeptide"

SEQ ID NO: 3763 - protein, 214 aa, synthetic construct; identical to SEQ ID NO: 316
  REGION 1..214: note = source = /note="Description of Artificial Sequence: Synthetic polypeptide"

SEQ ID NO: 3764 - protein, 214 aa, synthetic construct; identical to SEQ ID NO: 316
  REGION 1..214: note = source = /note="Description of Artificial Sequence: Synthetic polypeptide"

SEQ ID NO: 3765 - protein, 214 aa, synthetic construct; identical to SEQ ID NO: 316
  REGION 1..214: note = source = /note="Description of Artificial Sequence: Synthetic polypeptide"

SEQ ID NO: 3766 - protein, 214 aa, synthetic construct; identical to SEQ ID NO: 316
  REGION 1..214: note = source = /note="Description of Artificial Sequence: Synthetic polypeptide"

SEQ ID NO: 3767 - protein, 214 aa, synthetic construct; identical to SEQ ID NO: 316
  REGION 1..214: note = source = /note="Description of Artificial Sequence: Synthetic polypeptide"

SEQ ID NO: 3768 - protein, 214 aa, synthetic construct; identical to SEQ ID NO: 316
  REGION 1..214: note = source = /note="Description of Artificial Sequence: Synthetic polypeptide"

SEQ ID NO: 3769 - protein, 214 aa, synthetic construct; identical to SEQ ID NO: 316
  REGION 1..214: note = source = /note="Description of Artificial Sequence: Synthetic polypeptide"

SEQ ID NO: 3770 - protein, 214 aa, synthetic construct; identical to SEQ ID NO: 316
  REGION 1..214: note = source = /note="Description of Artificial Sequence: Synthetic polypeptide"

SEQ ID NO: 3771 - protein, 214 aa, synthetic construct; identical to SEQ ID NO: 316
  REGION 1..214: note = source = /note="Description of Artificial Sequence: Synthetic polypeptide"

SEQ ID NO: 3772 - protein, 214 aa, synthetic construct; identical to SEQ ID NO: 316
  REGION 1..214: note = source = /note="Description of Artificial Sequence: Synthetic polypeptide"

SEQ ID NO: 3773 - protein, 214 aa, synthetic construct; identical to SEQ ID NO: 316
  REGION 1..214: note = source = /note="Description of Artificial Sequence: Synthetic polypeptide"

SEQ ID NO: 3774 - protein, 214 aa, synthetic construct; identical to SEQ ID NO: 316
  REGION 1..214: note = source = /note="Description of Artificial Sequence: Synthetic polypeptide"

SEQ ID NO: 3775 - protein, 214 aa, synthetic construct; identical to SEQ ID NO: 316
  REGION 1..214: note = source = /note="Description of Artificial Sequence: Synthetic polypeptide"

SEQ ID NO: 3776 - protein, 214 aa, synthetic construct; identical to SEQ ID NO: 316
  REGION 1..214: note = source = /note="Description of Artificial Sequence: Synthetic polypeptide"

SEQ ID NO: 3777 - protein, 214 aa, synthetic construct; identical to SEQ ID NO: 316
  REGION 1..214: note = source = /note="Description of Artificial Sequence: Synthetic polypeptide"

SEQ ID NO: 3778 - protein, 214 aa, synthetic construct; identical to SEQ ID NO: 316
  REGION 1..214: note = source = /note="Description of Artificial Sequence: Synthetic polypeptide"

SEQ ID NO: 3779 - protein, 214 aa, synthetic construct; identical to SEQ ID NO: 316
  REGION 1..214: note = source = /note="Description of Artificial Sequence: Synthetic polypeptide"

SEQ ID NO: 3780 - protein, 214 aa, synthetic construct; identical to SEQ ID NO: 316
  REGION 1..214: note = source = /note="Description of Artificial Sequence: Synthetic polypeptide"

SEQ ID NO: 3781 - protein, 214 aa, synthetic construct; identical to SEQ ID NO: 316
  REGION 1..214: note = source = /note="Description of Artificial Sequence: Synthetic polypeptide"

SEQ ID NO: 3782 - protein, 214 aa, synthetic construct; identical to SEQ ID NO: 316
  REGION 1..214: note = source = /note="Description of Artificial Sequence: Synthetic polypeptide"

SEQ ID NO: 3783 - protein, 214 aa, synthetic construct; identical to SEQ ID NO: 316
  REGION 1..214: note = source = /note="Description of Artificial Sequence: Synthetic polypeptide"

SEQ ID NO: 3784 - protein, 214 aa, synthetic construct; identical to SEQ ID NO: 316
  REGION 1..214: note = source = /note="Description of Artificial Sequence: Synthetic polypeptide"

SEQ ID NO: 3785 - protein, 214 aa, synthetic construct; identical to SEQ ID NO: 316
  REGION 1..214: note = source = /note="Description of Artificial Sequence: Synthetic polypeptide"

SEQ ID NO: 3786 - protein, 214 aa, synthetic construct; identical to SEQ ID NO: 316
  REGION 1..214: note = source = /note="Description of Artificial Sequence: Synthetic polypeptide"

SEQ ID NO: 3787 - protein, 214 aa, synthetic construct; identical to SEQ ID NO: 316
  REGION 1..214: note = source = /note="Description of Artificial Sequence: Synthetic polypeptide"

SEQ ID NO: 3788 - protein, 214 aa, synthetic construct; identical to SEQ ID NO: 316
  REGION 1..214: note = source = /note="Description of Artificial Sequence: Synthetic polypeptide"

SEQ ID NO: 3789 - protein, 214 aa, synthetic construct; identical to SEQ ID NO: 316
  REGION 1..214: note = source = /note="Description of Artificial Sequence: Synthetic polypeptide"

SEQ ID NO: 3790 - protein, 214 aa, synthetic construct; identical to SEQ ID NO: 316
  REGION 1..214: note = source = /note="Description of Artificial Sequence: Synthetic polypeptide"

SEQ ID NO: 3791 - protein, 214 aa, synthetic construct; identical to SEQ ID NO: 316
  REGION 1..214: note = source = /note="Description of Artificial Sequence: Synthetic polypeptide"

SEQ ID NO: 3792 - protein, 214 aa, synthetic construct; identical to SEQ ID NO: 316
  REGION 1..214: note = source = /note="Description of Artificial Sequence: Synthetic polypeptide"

SEQ ID NO: 3793 - protein, 214 aa, synthetic construct; identical to SEQ ID NO: 316
  REGION 1..214: note = source = /note="Description of Artificial Sequence: Synthetic polypeptide"

SEQ ID NO: 3794 - protein, 214 aa, synthetic construct; identical to SEQ ID NO: 316
  REGION 1..214: note = source = /note="Description of Artificial Sequence: Synthetic polypeptide"

SEQ ID NO: 3795 - protein, 214 aa, synthetic construct; identical to SEQ ID NO: 316
  REGION 1..214: note = source = /note="Description of Artificial Sequence: Synthetic polypeptide"

SEQ ID NO: 3796 - protein, 214 aa, synthetic construct; identical to SEQ ID NO: 316
  REGION 1..214: note = source = /note="Description of Artificial Sequence: Synthetic polypeptide"

SEQ ID NO: 3797 - protein, 214 aa, synthetic construct; identical to SEQ ID NO: 316
  REGION 1..214: note = source = /note="Description of Artificial Sequence: Synthetic polypeptide"

SEQ ID NO: 3798 - protein, 214 aa, synthetic construct; identical to SEQ ID NO: 316
  REGION 1..214: note = source = /note="Description of Artificial Sequence: Synthetic polypeptide"

SEQ ID NO: 3799 - protein, 214 aa, synthetic construct; identical to SEQ ID NO: 316
  REGION 1..214: note = source = /note="Description of Artificial Sequence: Synthetic polypeptide"

SEQ ID NO: 3800 - protein, 214 aa, synthetic construct; identical to SEQ ID NO: 316
  REGION 1..214: note = source = /note="Description of Artificial Sequence: Synthetic polypeptide"

SEQ ID NO: 3801 - protein, 214 aa, synthetic construct; identical to SEQ ID NO: 316
  REGION 1..214: note = source = /note="Description of Artificial Sequence: Synthetic polypeptide"

SEQ ID NO: 3802 - protein, 214 aa, synthetic construct; identical to SEQ ID NO: 316
  REGION 1..214: note = source = /note="Description of Artificial Sequence: Synthetic polypeptide"

SEQ ID NO: 3803 - protein, 214 aa, synthetic construct; identical to SEQ ID NO: 316
  REGION 1..214: note = source = /note="Description of Artificial Sequence: Synthetic polypeptide"

SEQ ID NO: 3804 - protein, 214 aa, synthetic construct; identical to SEQ ID NO: 316
  REGION 1..214: note = source = /note="Description of Artificial Sequence: Synthetic polypeptide"

SEQ ID NO: 3805 - protein, 214 aa, synthetic construct; identical to SEQ ID NO: 316
  REGION 1..214: note = source = /note="Description of Artificial Sequence: Synthetic polypeptide"

SEQ ID NO: 3806 - protein, 214 aa, synthetic construct; identical to SEQ ID NO: 316
  REGION 1..214: note = source = /note="Description of Artificial Sequence: Synthetic polypeptide"

SEQ ID NO: 3807 - protein, 214 aa, synthetic construct; identical to SEQ ID NO: 316
  REGION 1..214: note = source = /note="Description of Artificial Sequence: Synthetic polypeptide"

SEQ ID NO: 3808 - protein, 214 aa, synthetic construct; identical to SEQ ID NO: 316
  REGION 1..214: note = source = /note="Description of Artificial Sequence: Synthetic polypeptide"

SEQ ID NO: 3809 - protein, 214 aa, synthetic construct; identical to SEQ ID NO: 316
  REGION 1..214: note = source = /note="Description of Artificial Sequence: Synthetic polypeptide"

SEQ ID NO: 3810 - protein, 214 aa, synthetic construct; identical to SEQ ID NO: 316
  REGION 1..214: note = source = /note="Description of Artificial Sequence: Synthetic polypeptide"

SEQ ID NO: 3811 - protein, 214 aa, synthetic construct; identical to SEQ ID NO: 316
  REGION 1..214: note = source = /note="Description of Artificial Sequence: Synthetic polypeptide"

SEQ ID NO: 3812 - protein, 214 aa, synthetic construct; identical to SEQ ID NO: 316
  REGION 1..214: note = source = /note="Description of Artificial Sequence: Synthetic polypeptide"

SEQ ID NO: 3813 - protein, 214 aa, synthetic construct; identical to SEQ ID NO: 316
  REGION 1..214: note = source = /note="Description of Artificial Sequence: Synthetic polypeptide"

SEQ ID NO: 3814 - protein, 214 aa, synthetic construct; identical to SEQ ID NO: 316
  REGION 1..214: note = source = /note="Description of Artificial Sequence: Synthetic polypeptide"

SEQ ID NO: 3815 - protein, 214 aa, synthetic construct; identical to SEQ ID NO: 316
  REGION 1..214: note = source = /note="Description of Artificial Sequence: Synthetic polypeptide"

SEQ ID NO: 3816 - protein, 214 aa, synthetic construct; identical to SEQ ID NO: 316
  REGION 1..214: note = source = /note="Description of Artificial Sequence: Synthetic polypeptide"

SEQ ID NO: 3817 - protein, 214 aa, synthetic construct; identical to SEQ ID NO: 316
  REGION 1..214: note = source = /note="Description of Artificial Sequence: Synthetic polypeptide"

SEQ ID NO: 3818 - protein, 214 aa, synthetic construct; identical to SEQ ID NO: 316
  REGION 1..214: note = source = /note="Description of Artificial Sequence: Synthetic polypeptide"

SEQ ID NO: 3819 - protein, 214 aa, synthetic construct; identical to SEQ ID NO: 316
  REGION 1..214: note = source = /note="Description of Artificial Sequence: Synthetic polypeptide"

SEQ ID NO: 3820 - protein, 214 aa, synthetic construct; identical to SEQ ID NO: 316
  REGION 1..214: note = source = /note="Description of Artificial Sequence: Synthetic polypeptide"

SEQ ID NO: 3821 - protein, 214 aa, synthetic construct; identical to SEQ ID NO: 316
  REGION 1..214: note = source = /note="Description of Artificial Sequence: Synthetic polypeptide"

SEQ ID NO: 3822 - protein, 214 aa, synthetic construct; identical to SEQ ID NO: 316
  REGION 1..214: note = source = /note="Description of Artificial Sequence: Synthetic polypeptide"

SEQ ID NO: 3823 - protein, 214 aa, synthetic construct; identical to SEQ ID NO: 316
  REGION 1..214: note = source = /note="Description of Artificial Sequence: Synthetic polypeptide"

SEQ ID NO: 3824 - protein, 214 aa, synthetic construct; identical to SEQ ID NO: 324
  REGION 1..214: note = source = /note="Description of Artificial Sequence: Synthetic polypeptide"

SEQ ID NO: 3825 - protein, 214 aa, synthetic construct; identical to SEQ ID NO: 324
  REGION 1..214: note = source = /note="Description of Artificial Sequence: Synthetic polypeptide"

SEQ ID NO: 3826 - protein, 214 aa, synthetic construct; identical to SEQ ID NO: 324
  REGION 1..214: note = source = /note="Description of Artificial Sequence: Synthetic polypeptide"

SEQ ID NO: 3827 - protein, 214 aa, synthetic construct; identical to SEQ ID NO: 324
  REGION 1..214: note = source = /note="Description of Artificial Sequence: Synthetic polypeptide"

SEQ ID NO: 3828 - protein, 214 aa, synthetic construct; identical to SEQ ID NO: 324
  REGION 1..214: note = source = /note="Description of Artificial Sequence: Synthetic polypeptide"

SEQ ID NO: 3829 - protein, 214 aa, synthetic construct; identical to SEQ ID NO: 324
  REGION 1..214: note = source = /note="Description of Artificial Sequence: Synthetic polypeptide"

SEQ ID NO: 3830 - protein, 450 aa, synthetic construct; identical to SEQ ID NO: 542
  REGION 1..450: note = source = /note="Description of Artificial Sequence: Synthetic polypeptide"

SEQ ID NO: 3831 - protein, 450 aa, synthetic construct; identical to SEQ ID NO: 542
  REGION 1..450: note = source = /note="Description of Artificial Sequence: Synthetic polypeptide"

SEQ ID NO: 3832 - protein, 450 aa, synthetic construct; identical to SEQ ID NO: 542
  REGION 1..450: note = source = /note="Description of Artificial Sequence: Synthetic polypeptide"

SEQ ID NO: 3833 - protein, 450 aa, synthetic construct; identical to SEQ ID NO: 542
  REGION 1..450: note = source = /note="Description of Artificial Sequence: Synthetic polypeptide"

SEQ ID NO: 3834 - protein, 450 aa, synthetic construct; identical to SEQ ID NO: 542
  REGION 1..450: note = source = /note="Description of Artificial Sequence: Synthetic polypeptide"

SEQ ID NO: 3835 - protein, 450 aa, synthetic construct; identical to SEQ ID NO: 542
  REGION 1..450: note = source = /note="Description of Artificial Sequence: Synthetic polypeptide"

SEQ ID NO: 3836 - protein, 216 aa, synthetic construct; identical to SEQ ID NO: 449
  REGION 1..216: note = source = /note="Description of Artificial Sequence: Synthetic polypeptide"

SEQ ID NO: 3837 - protein, 458 aa, synthetic construct; identical to SEQ ID NO: 607
  REGION 1..458: note = source = /note="Description of Artificial Sequence: Synthetic polypeptide"

SEQ ID NO: 3838 - protein, 216 aa, synthetic construct; identical to SEQ ID NO: 449
  REGION 1..216: note = source = /note="Description of Artificial Sequence: Synthetic polypeptide"

SEQ ID NO: 3839 - protein, 458 aa, synthetic construct; identical to SEQ ID NO: 607
  REGION 1..458: note = source = /note="Description of Artificial Sequence: Synthetic polypeptide"

SEQ ID NO: 3840 - protein, 216 aa, synthetic construct; identical to SEQ ID NO: 449
  REGION 1..216: note = source = /note="Description of Artificial Sequence: Synthetic polypeptide"

SEQ ID NO: 3841 - protein, 458 aa, synthetic construct; identical to SEQ ID NO: 607
  REGION 1..458: note = source = /note="Description of Artificial Sequence: Synthetic polypeptide"

SEQ ID NO: 3842 - protein, 216 aa, synthetic construct; identical to SEQ ID NO: 449
  REGION 1..216: note = source = /note="Description of Artificial Sequence: Synthetic polypeptide"

SEQ ID NO: 3843 - protein, 458 aa, synthetic construct; identical to SEQ ID NO: 607
  REGION 1..458: note = source = /note="Description of Artificial Sequence: Synthetic polypeptide"

SEQ ID NO: 3844 - protein, 216 aa, synthetic construct; identical to SEQ ID NO: 449
  REGION 1..216: note = source = /note="Description of Artificial Sequence: Synthetic polypeptide"

SEQ ID NO: 3845 - protein, 458 aa, synthetic construct; identical to SEQ ID NO: 607
  REGION 1..458: note = source = /note="Description of Artificial Sequence: Synthetic polypeptide"

SEQ ID NO: 3846 - protein, 216 aa, synthetic construct; identical to SEQ ID NO: 449
  REGION 1..216: note = source = /note="Description of Artificial Sequence: Synthetic polypeptide"

SEQ ID NO: 3847 - protein, 458 aa, synthetic construct; identical to SEQ ID NO: 607
  REGION 1..458: note = source = /note="Description of Artificial Sequence: Synthetic polypeptide"

SEQ ID NO: 3848 - protein, 214 aa, synthetic construct; identical to SEQ ID NO: 455
  REGION 1..214: note = source = /note="Description of Artificial Sequence: Synthetic polypeptide"

SEQ ID NO: 3849 - protein, 451 aa, synthetic construct; identical to SEQ ID NO: 612
  REGION 1..451: note = source = /note="Description of Artificial Sequence: Synthetic polypeptide"

SEQ ID NO: 3850 - protein, 214 aa, synthetic construct; identical to SEQ ID NO: 455
  REGION 1..214: note = source = /note="Description of Artificial Sequence: Synthetic polypeptide"

SEQ ID NO: 3851 - protein, 451 aa, synthetic construct; identical to SEQ ID NO: 612
  REGION 1..451: note = source = /note="Description of Artificial Sequence: Synthetic polypeptide"

SEQ ID NO: 3852 - protein, 214 aa, synthetic construct; identical to SEQ ID NO: 455
  REGION 1..214: note = source = /note="Description of Artificial Sequence: Synthetic polypeptide"

SEQ ID NO: 3853 - protein, 451 aa, synthetic construct; identical to SEQ ID NO: 612
  REGION 1..451: note = source = /note="Description of Artificial Sequence: Synthetic polypeptide"

SEQ ID NO: 3854 - protein, 214 aa, synthetic construct; identical to SEQ ID NO: 455
  REGION 1..214: note = source = /note="Description of Artificial Sequence: Synthetic polypeptide"

SEQ ID NO: 3855 - protein, 451 aa, synthetic construct; identical to SEQ ID NO: 612
  REGION 1..451: note = source = /note="Description of Artificial Sequence: Synthetic polypeptide"

SEQ ID NO: 3856 - protein, 214 aa, synthetic construct; identical to SEQ ID NO: 455
  REGION 1..214: note = source = /note="Description of Artificial Sequence: Synthetic polypeptide"

SEQ ID NO: 3857 - protein, 451 aa, synthetic construct; identical to SEQ ID NO: 612
  REGION 1..451: note = source = /note="Description of Artificial Sequence: Synthetic polypeptide"

SEQ ID NO: 3858 - protein, 214 aa, synthetic construct; identical to SEQ ID NO: 455
  REGION 1..214: note = source = /note="Description of Artificial Sequence: Synthetic polypeptide"

SEQ ID NO: 3859 - protein, 451 aa, synthetic construct; identical to SEQ ID NO: 612
  REGION 1..451: note = source = /note="Description of Artificial Sequence: Synthetic polypeptide"

SEQ ID NO: 3860 - protein, 214 aa, synthetic construct; identical to SEQ ID NO: 324
  REGION 1..214: note = source = /note="Description of Artificial Sequence: Synthetic polypeptide"

SEQ ID NO: 3861 - protein, 450 aa, synthetic construct; identical to SEQ ID NO: 542
  REGION 1..450: note = source = /note="Description of Artificial Sequence: Synthetic polypeptide"

SEQ ID NO: 3862 - protein, 214 aa, synthetic construct; identical to SEQ ID NO: 324
  REGION 1..214: note = source = /note="Description of Artificial Sequence: Synthetic polypeptide"

SEQ ID NO: 3863 - protein, 450 aa, synthetic construct; identical to SEQ ID NO: 542
  REGION 1..450: note = source = /note="Description of Artificial Sequence: Synthetic polypeptide"

SEQ ID NO: 3864 - protein, 214 aa, synthetic construct; identical to SEQ ID NO: 324
  REGION 1..214: note = source = /note="Description of Artificial Sequence: Synthetic polypeptide"

SEQ ID NO: 3865 - protein, 450 aa, synthetic construct; identical to SEQ ID NO: 542
  REGION 1..450: note = source = /note="Description of Artificial Sequence: Synthetic polypeptide"

SEQ ID NO: 3866 - protein, 214 aa, synthetic construct; identical to SEQ ID NO: 324
  REGION 1..214: note = source = /note="Description of Artificial Sequence: Synthetic polypeptide"

SEQ ID NO: 3867 - protein, 450 aa, synthetic construct; identical to SEQ ID NO: 542
  REGION 1..450: note = source = /note="Description of Artificial Sequence: Synthetic polypeptide"

SEQ ID NO: 3868 - protein, 214 aa, synthetic construct; identical to SEQ ID NO: 324
  REGION 1..214: note = source = /note="Description of Artificial Sequence: Synthetic polypeptide"

SEQ ID NO: 3869 - protein, 450 aa, synthetic construct; identical to SEQ ID NO: 542
  REGION 1..450: note = source = /note="Description of Artificial Sequence: Synthetic polypeptide"

SEQ ID NO: 3870 - protein, 214 aa, synthetic construct; identical to SEQ ID NO: 324
  REGION 1..214: note = source = /note="Description of Artificial Sequence: Synthetic polypeptide"

SEQ ID NO: 3871 - protein, 450 aa, synthetic construct; identical to SEQ ID NO: 542
  REGION 1..450: note = source = /note="Description of Artificial Sequence: Synthetic polypeptide"

SEQ ID NO: 3872 - protein, 214 aa, synthetic construct; identical to SEQ ID NO: 324
  REGION 1..214: note = source = /note="Description of Artificial Sequence: Synthetic polypeptide"

SEQ ID NO: 3873 - protein, 450 aa, synthetic construct; identical to SEQ ID NO: 542
  REGION 1..450: note = source = /note="Description of Artificial Sequence: Synthetic polypeptide"

SEQ ID NO: 3874 - protein, 214 aa, synthetic construct; identical to SEQ ID NO: 324
  REGION 1..214: note = source = /note="Description of Artificial Sequence: Synthetic polypeptide"

SEQ ID NO: 3875 - protein, 450 aa, synthetic construct; identical to SEQ ID NO: 542
  REGION 1..450: note = source = /note="Description of Artificial Sequence: Synthetic polypeptide"

SEQ ID NO: 3876 - protein, 450 aa, synthetic construct; identical to SEQ ID NO: 542
  REGION 1..450: note = source = /note="Description of Artificial Sequence: Synthetic polypeptide"

SEQ ID NO: 3877 - protein, 450 aa, synthetic construct
  REGION 1..450: note = source = /note="Description of Artificial Sequence: Synthetic polypeptide"
QVQLVESGGGVVQPGRSLRLSCAASGFTFSNYGMHWVRQAPGEGLEWVAAIWFDASDKYYADAVKGRFTISRDNSKNTLYLQMNSLRAEDTAVYYCARDLAIFGVVPDYWGQGTLVTVSSASTKGPSVFPLAPSSKSTSGGTAALGCLVKDYFPEPVTVSWNSGALTSGVHTFPAVLQSSGLYSLSSVVTVPSSSLGTQTYICNVNHKPSNTKVDKKVEPKSCDKTHTCPPCPAPELLGGPSVFLFPPKPKDTLMISRTPEVTCVVVDVSHEDPEVKFNWYVDGVEVHNAKTKPCEEQYGSTYRCVSVLTVLHQDWLNGKEYKCKVSNKALPAPIEKTISKAKGQPREPQVYTLPPSREEMTKNQVSLTCLVKGFYPSDIAVEWESNGQPENNYKTTPPVLDSDGSFFLYSKLTVDKSRWQQGNVFSCSVMHEALHNHYTQKSLSLSPGK

SEQ ID NO: 3878 - protein, 450 aa, synthetic construct; identical to SEQ ID NO: 542
  REGION 1..450: note = source = /note="Description of Artificial Sequence: Synthetic polypeptide"

SEQ ID NO: 3879 - protein, 450 aa, synthetic construct; identical to SEQ ID NO: 3877
  REGION 1..450: note = source = /note="Description of Artificial Sequence: Synthetic polypeptide"

SEQ ID NO: 3880 - protein, 450 aa, synthetic construct; identical to SEQ ID NO: 3877
  REGION 1..450: note = source = /note="Description of Artificial Sequence: Synthetic polypeptide"

SEQ ID NO: 3881 - protein, 450 aa, synthetic construct; identical to SEQ ID NO: 542
  REGION 1..450: note = source = /note="Description of Artificial Sequence: Synthetic polypeptide"

SEQ ID NO: 3882 - protein, 450 aa, synthetic construct; identical to SEQ ID NO: 3877
  REGION 1..450: note = source = /note="Description of Artificial Sequence: Synthetic polypeptide"

SEQ ID NO: 3883 - protein, 450 aa, synthetic construct; identical to SEQ ID NO: 542
  REGION 1..450: note = source = /note="Description of Artificial Sequence: Synthetic polypeptide"

SEQ ID NO: 3884 - protein, 450 aa, synthetic construct; identical to SEQ ID NO: 3877
  REGION 1..450: note = source = /note="Description of Artificial Sequence: Synthetic polypeptide"

SEQ ID NO: 3885 - protein, 450 aa, synthetic construct; identical to SEQ ID NO: 3877
  REGION 1..450: note = source = /note="Description of Artificial Sequence: Synthetic polypeptide"

SEQ ID NO: 3886 - protein, 450 aa, synthetic construct; identical to SEQ ID NO: 542
  REGION 1..450: note = source = /note="Description of Artificial Sequence: Synthetic polypeptide"

SEQ ID NO: 3887 - protein, 450 aa, synthetic construct; identical to SEQ ID NO: 3877
  REGION 1..450: note = source = /note="Description of Artificial Sequence: Synthetic polypeptide"

SEQ ID NO: 3888 - protein, 450 aa, synthetic construct; identical to SEQ ID NO: 542
  REGION 1..450: note = source = /note="Description of Artificial Sequence: Synthetic polypeptide"

SEQ ID NO: 3889 - protein, 450 aa, synthetic construct; identical to SEQ ID NO: 3877
  REGION 1..450: note = source = /note="Description of Artificial Sequence: Synthetic polypeptide"

SEQ ID NO: 3890 - protein, 450 aa, synthetic construct; identical to SEQ ID NO: 3877
  REGION 1..450: note = source = /note="Description of Artificial Sequence: Synthetic polypeptide"

SEQ ID NO: 3891 - protein, 450 aa, synthetic construct; identical to SEQ ID NO: 542
  REGION 1..450: note = source = /note="Description of Artificial Sequence: Synthetic polypeptide"

SEQ ID NO: 3892 - protein, 450 aa, synthetic construct; identical to SEQ ID NO: 3877
  REGION 1..450: note = source = /note="Description of Artificial Sequence: Synthetic polypeptide"

SEQ ID NO: 3893 - protein, 450 aa, synthetic construct; identical to SEQ ID NO: 542
  REGION 1..450: note = source = /note="Description of Artificial Sequence: Synthetic polypeptide"

SEQ ID NO: 3894 - protein, 450 aa, synthetic construct; identical to SEQ ID NO: 3877
  REGION 1..450: note = source = /note="Description of Artificial Sequence: Synthetic polypeptide"

SEQ ID NO: 3895 - protein, 450 aa, synthetic construct; identical to SEQ ID NO: 3877
  REGION 1..450: note = source = /note="Description of Artificial Sequence: Synthetic polypeptide"

SEQ ID NO: 3896 - protein, 450 aa, synthetic construct; identical to SEQ ID NO: 542
  REGION 1..450: note = source = /note="Description of Artificial Sequence: Synthetic polypeptide"

SEQ ID NO: 3897 - protein, 450 aa, synthetic construct; identical to SEQ ID NO: 3877
  REGION 1..450: note = source = /note="Description of Artificial Sequence: Synthetic polypeptide"

SEQ ID NO: 3898 - protein, 450 aa, synthetic construct; identical to SEQ ID NO: 542
  REGION 1..450: note = source = /note="Description of Artificial Sequence: Synthetic polypeptide"

SEQ ID NO: 3899 - protein, 450 aa, synthetic construct; identical to SEQ ID NO: 3877
  REGION 1..450: note = source = /note="Description of Artificial Sequence: Synthetic polypeptide"

SEQ ID NO: 3900 - protein, 450 aa, synthetic construct; identical to SEQ ID NO: 3877
  REGION 1..450: note = source = /note="Description of Artificial Sequence: Synthetic polypeptide"

SEQ ID NO: 3901 - protein, 450 aa, synthetic construct; identical to SEQ ID NO: 542
  REGION 1..450: note = source = /note="Description of Artificial Sequence: Synthetic polypeptide"

SEQ ID NO: 3902 - protein, 450 aa, synthetic construct; identical to SEQ ID NO: 3877
  REGION 1..450: note = source = /note="Description of Artificial Sequence: Synthetic polypeptide"

SEQ ID NO: 3903 - protein, 450 aa, synthetic construct; identical to SEQ ID NO: 542
  REGION 1..450: note = source = /note="Description of Artificial Sequence: Synthetic polypeptide"

SEQ ID NO: 3904 - protein, 450 aa, synthetic construct; identical to SEQ ID NO: 3877
  REGION 1..450: note = source = /note="Description of Artificial Sequence: Synthetic polypeptide"

SEQ ID NO: 3905 - protein, 450 aa, synthetic construct; identical to SEQ ID NO: 3877
  REGION 1..450: note = source = /note="Description of Artificial Sequence: Synthetic polypeptide"

SEQ ID NO: 3906 - protein, 450 aa, synthetic construct; identical to SEQ ID NO: 542
  REGION 1..450: note = source = /note="Description of Artificial Sequence: Synthetic polypeptide"

SEQ ID NO: 3907 - protein, 450 aa, synthetic construct; identical to SEQ ID NO: 3877
  REGION 1..450: note = source = /note="Description of Artificial Sequence: Synthetic polypeptide"

SEQ ID NO: 3908 - protein, 450 aa, synthetic construct; identical to SEQ ID NO: 542
  REGION 1..450: note = source = /note="Description of Artificial Sequence: Synthetic polypeptide"

SEQ ID NO: 3909 - protein, 450 aa, synthetic construct; identical to SEQ ID NO: 3877
  REGION 1..450: note = source = /note="Description of Artificial Sequence: Synthetic polypeptide"

SEQ ID NO: 3910 - protein, 450 aa, synthetic construct; identical to SEQ ID NO: 3877
  REGION 1..450: note = source = /note="Description of Artificial Sequence: Synthetic polypeptide"

SEQ ID NO: 3911 - protein, 450 aa, synthetic construct; identical to SEQ ID NO: 542
  REGION 1..450: note = source = /note="Description of Artificial Sequence: Synthetic polypeptide"

SEQ ID NO: 3912 - protein, 450 aa, synthetic construct; identical to SEQ ID NO: 3877
  REGION 1..450: note = source = /note="Description of Artificial Sequence: Synthetic polypeptide"

SEQ ID NO: 3913 - protein, 450 aa, synthetic construct; identical to SEQ ID NO: 542
  REGION 1..450: note = source = /note="Description of Artificial Sequence: Synthetic polypeptide"

SEQ ID NO: 3914 - protein, 450 aa, synthetic construct; identical to SEQ ID NO: 3877
  REGION 1..450: note = source = /note="Description of Artificial Sequence: Synthetic polypeptide"

SEQ ID NO: 3915 - protein, 450 aa, synthetic construct; identical to SEQ ID NO: 3877
  REGION 1..450: note = source = /note="Description of Artificial Sequence: Synthetic polypeptide"

SEQ ID NO: 3916 - protein, 450 aa, synthetic construct; identical to SEQ ID NO: 542
  REGION 1..450: note = source = /note="Description of Artificial Sequence: Synthetic polypeptide"

SEQ ID NO: 3917 - protein, 450 aa, synthetic construct; identical to SEQ ID NO: 3877
  REGION 1..450: note = source = /note="Description of Artificial Sequence: Synthetic polypeptide"

SEQ ID NO: 3918 - protein, 450 aa, synthetic construct; identical to SEQ ID NO: 542
  REGION 1..450: note = source = /note="Description of Artificial Sequence: Synthetic polypeptide"

SEQ ID NO: 3919 - protein, 450 aa, synthetic construct; identical to SEQ ID NO: 3877
  REGION 1..450: note = source = /note="Description of Artificial Sequence: Synthetic polypeptide"

SEQ ID NO: 3920 - protein, 450 aa, synthetic construct; identical to SEQ ID NO: 3877
  REGION 1..450: note = source = /note="Description of Artificial Sequence: Synthetic polypeptide"

SEQ ID NO: 3921 - protein, 450 aa, synthetic construct; identical to SEQ ID NO: 542
  REGION 1..450: note = source = /note="Description of Artificial Sequence: Synthetic polypeptide"

SEQ ID NO: 3922 - protein, 450 aa, synthetic construct; identical to SEQ ID NO: 3877
  REGION 1..450: note = source = /note="Description of Artificial Sequence: Synthetic polypeptide"

SEQ ID NO: 3923 - protein, 450 aa, synthetic construct; identical to SEQ ID NO: 542
  REGION 1..450: note = source = /note="Description of Artificial Sequence: Synthetic polypeptide"

SEQ ID NO: 3924 - protein, 450 aa, synthetic construct; identical to SEQ ID NO: 3877
  REGION 1..450: note = source = /note="Description of Artificial Sequence: Synthetic polypeptide"

SEQ ID NO: 3925 - protein, 450 aa, synthetic construct; identical to SEQ ID NO: 3877
  REGION 1..450: note = source = /note="Description of Artificial Sequence: Synthetic polypeptide"

SEQ ID NO: 3926 - protein, 450 aa, synthetic construct; identical to SEQ ID NO: 542
  REGION 1..450: note = source = /note="Description of Artificial Sequence: Synthetic polypeptide"

SEQ ID NO: 3927 - protein, 450 aa, synthetic construct; identical to SEQ ID NO: 3877
  REGION 1..450: note = source = /note="Description of Artificial Sequence: Synthetic polypeptide"

SEQ ID NO: 3928 - protein, 450 aa, synthetic construct; identical to SEQ ID NO: 542
  REGION 1..450: note = source = /note="Description of Artificial Sequence: Synthetic polypeptide"

SEQ ID NO: 3929 - protein, 450 aa, synthetic construct; identical to SEQ ID NO: 3877
  REGION 1..450: note = source = /note="Description of Artificial Sequence: Synthetic polypeptide"

SEQ ID NO: 3930 - protein, 450 aa, synthetic construct; identical to SEQ ID NO: 3877
  REGION 1..450: note = source = /note="Description of Artificial Sequence: Synthetic polypeptide"

SEQ ID NO: 3931 - protein, 450 aa, synthetic construct; identical to SEQ ID NO: 542
  REGION 1..450: note = source = /note="Description of Artificial Sequence: Synthetic polypeptide"

SEQ ID NO: 3932 - protein, 450 aa, synthetic construct; identical to SEQ ID NO: 3877
  REGION 1..450: note = source = /note="Description of Artificial Sequence: Synthetic polypeptide"

SEQ ID NO: 3933 - protein, 450 aa, synthetic construct; identical to SEQ ID NO: 542
  REGION 1..450: note = source = /note="Description of Artificial Sequence: Synthetic polypeptide"

SEQ ID NO: 3934 - protein, 450 aa, synthetic construct; identical to SEQ ID NO: 3877
  REGION 1..450: note = source = /note="Description of Artificial Sequence: Synthetic polypeptide"

SEQ ID NO: 3935 - protein, 450 aa, synthetic construct; identical to SEQ ID NO: 3877
  REGION 1..450: note = source = /note="Description of Artificial Sequence: Synthetic polypeptide"

SEQ ID NO: 3936 - protein, 450 aa, synthetic construct; identical to SEQ ID NO: 3877
  REGION 1..450: note = source = /note="Description of Artificial Sequence: Synthetic polypeptide"

SEQ ID NO: 3937 - protein, 450 aa, synthetic construct; identical to SEQ ID NO: 3877
  REGION 1..450: note = source = /note="Description of Artificial Sequence: Synthetic polypeptide"

SEQ ID NO: 3938 - protein, 450 aa, synthetic construct; identical to SEQ ID NO: 3877
  REGION 1..450: note = source = /note="Description of Artificial Sequence: Synthetic polypeptide"

SEQ ID NO: 3939 - protein, 450 aa, synthetic construct; identical to SEQ ID NO: 3877
  REGION 1..450: note = source = /note="Description of Artificial Sequence: Synthetic polypeptide"

SEQ ID NO: 3940 - protein, 450 aa, synthetic construct; identical to SEQ ID NO: 3877
  REGION 1..450: note = source = /note="Description of Artificial Sequence: Synthetic polypeptide"

SEQ ID NO: 3941 - protein, 450 aa, synthetic construct; identical to SEQ ID NO: 3877
  REGION 1..450: note = source = /note="Description of Artificial Sequence: Synthetic polypeptide"

SEQ ID NO: 3942 - protein, 450 aa, synthetic construct; identical to SEQ ID NO: 3877
  REGION 1..450: note = source = /note="Description of Artificial Sequence: Synthetic polypeptide"

SEQ ID NO: 3943 - protein, 450 aa, synthetic construct; identical to SEQ ID NO: 3877
  REGION 1..450: note = source = /note="Description of Artificial Sequence: Synthetic polypeptide"

SEQ ID NO: 3944 - protein, 450 aa, synthetic construct; identical to SEQ ID NO: 3877
  REGION 1..450: note = source = /note="Description of Artificial Sequence: Synthetic polypeptide"

SEQ ID NO: 3945 - protein, 450 aa, synthetic construct; identical to SEQ ID NO: 3877
  REGION 1..450: note = source = /note="Description of Artificial Sequence: Synthetic polypeptide"

SEQ ID NO: 3946 - protein, 450 aa, synthetic construct; identical to SEQ ID NO: 3877
  REGION 1..450: note = source = /note="Description of Artificial Sequence: Synthetic polypeptide"

SEQ ID NO: 3947 - protein, 450 aa, synthetic construct; identical to SEQ ID NO: 3877
  REGION 1..450: note = source = /note="Description of Artificial Sequence: Synthetic polypeptide"

SEQ ID NO: 3948 - protein, 29 aa, synthetic construct
  REGION 1..29: note = source = /note="Description of Artificial Sequence: Synthetic peptide"
HAEGTFTSDVSSYLEGQAAKEFIAWLVKG

What is claimed:

1. A composition comprising
a) an antibody or functional fragment thereof that specifically binds to human GIPR, wherein the antibody or functional fragment thereof comprises a light chain variable region and a heavy chain variable region; and
b) a GLP-1 receptor agonist, wherein the C-terminus of the GLP-1 receptor agonist is fused to N-terminus of either the light chain variable region or the heavy chain variable region.

2. The composition of claim 1, wherein said human GIPR has a sequence comprising a sequence selected from the group consisting of SEQ ID NO: 3141, SEQ ID NO: 3143, and SEQ ID NO: 3145.

3. The composition of claim 1, wherein said antibody or functional fragment thereof is a monoclonal antibody, a recombinant antibody, a human antibody, a humanized antibody, a chimeric antibody, a multispecific antibody, or an antibody fragment thereof.

4. The composition of claim 3, wherein said antibody fragment is a Fab fragment, a Fab′ fragment, or a F(ab′)2 fragment.

5. The composition of claim 3, wherein said antibody or functional fragment thereof is a human antibody.

6. The composition of claim 3, wherein said antibody or functional fragment thereof is a monoclonal antibody.

7. The composition of claim 3, wherein said antibody or functional fragment thereof is of the IgG1-, IgG2- IgG3- or IgG4-type.

8. The composition of claim 7, wherein said antibody or functional fragment thereof is of the IgG1- or the IgG2-type.

9. The composition of one of claim 3, wherein said antibody or functional fragment thereof inhibits binding of GIP to the extracellular portion of human GIPR.

10. The composition of claim 3, wherein said antibody comprises a CDRL1, a CDRL2, a CDRL3, a CDRH1, a CDRH2, and a CDRH3, wherein said CDRL1 comprises a sequence selected from the group consisting of SEQ ID NOs: 629-785; said CDRL2 comprises a sequence selected from the group consisting of SEQ ID NOs: 786-942; said CDRL3 comprises a sequence selected from the group consisting of SEQ ID NOs: 943-1099; said CDRH1 comprises a sequence selected from the group consisting of SEQ ID NOs: 1100-1256; said CDRH2 comprises a sequence selected from the group consisting of SEQ ID NOs: 1257-1413; and said CDRH3 comprises a sequence selected from the group consisting of SEQ ID NOs: 1414-1570.

11. The composition of claim 3, wherein said antibody comprises a CDRL1, a CDRL2, a CDRL3, a CDRH1, a CDRH2, and a CDRH3, wherein each CDRL1, CDRL2, CDRL3, CDRH1, CDRH2, and CDRH3, respectively, comprises a sequence selected from the group consisting of SEQ ID NO: 629, SEQ ID NO: 786, SEQ ID NO: 943, SEQ ID NO: 1100, SEQ ID NO: 1257, and SEQ ID NO: 1414; SEQ ID NO: 630, SEQ ID NO: 787, SEQ ID NO: 944, SEQ ID NO: 1101, SEQ ID NO: 1258, and SEQ ID NO: 1415; SEQ ID NO: 631, SEQ ID NO: 788, SEQ ID NO: 945, SEQ ID NO: 1102, SEQ ID NO: 1259, and SEQ ID NO: 1416; SEQ ID NO: 632, SEQ ID NO: 789, SEQ ID NO: 946, SEQ ID NO: 1103, SEQ ID NO: 1260, and SEQ ID NO: 1417; SEQ ID NO: 633, SEQ ID NO: 790, SEQ ID NO: 947, SEQ ID NO: 1104, SEQ ID NO: 1261, and SEQ ID NO: 1418; SEQ ID NO: 634, SEQ ID NO: 791, SEQ ID NO: 948, SEQ ID NO: 1105, SEQ ID NO: 1262, and SEQ ID NO: 1419; SEQ ID NO: 635, SEQ ID NO: 792, SEQ ID NO: 949, SEQ ID NO: 1106, SEQ ID NO: 1263, and SEQ ID NO: 1420; SEQ ID NO: 636, SEQ ID NO: 793, SEQ ID NO: 950, SEQ ID NO: 1107, SEQ ID NO: 1264, and SEQ ID NO: 1421; SEQ ID NO: 637, SEQ ID NO: 794, SEQ ID NO: 951, SEQ ID NO: 1108, SEQ ID NO: 1265, and SEQ ID NO: 1422; SEQ ID NO: 638, SEQ ID NO: 795, SEQ ID NO: 952, SEQ ID NO: 1109, SEQ ID NO: 1266, and SEQ ID NO: 1423; SEQ ID NO: 639, SEQ ID NO: 796, SEQ ID NO: 953, SEQ ID NO: 1110, SEQ ID NO: 1267, and SEQ ID NO: 1424; SEQ ID NO: 640, SEQ ID NO: 797, SEQ ID NO: 954, SEQ ID NO: 1111, SEQ ID NO: 1268, and SEQ ID NO: 1425; SEQ ID NO: 641, SEQ ID NO: 798, SEQ ID NO: 955, SEQ ID NO: 1112, SEQ ID NO: 1269, and SEQ ID NO: 1426; SEQ ID NO: 642, SEQ ID NO: 799, SEQ ID NO: 956, SEQ ID NO: 1113, SEQ ID NO: 1270, and SEQ ID NO: 1427; SEQ ID NO: 643, SEQ ID NO: 800, SEQ ID NO: 957, SEQ ID NO: 1114, SEQ ID NO: 1271, and SEQ ID NO: 1428; SEQ ID NO: 644, SEQ ID NO: 801, SEQ ID NO: 958, SEQ ID NO: 1115, SEQ ID NO: 1272, and SEQ ID NO: 1429; SEQ ID NO: 645, SEQ ID NO: 802, SEQ ID NO: 959, SEQ ID NO: 1116, SEQ ID NO: 1273, and SEQ ID NO: 1430; SEQ ID NO: 646, SEQ ID NO: 803, SEQ ID NO: 960, SEQ ID NO: 1117, SEQ ID NO: 1274, and SEQ ID NO: 1431; SEQ ID NO: 647, SEQ ID NO: 804, SEQ ID NO: 961, SEQ ID NO: 1118, SEQ ID NO: 1275, and SEQ ID NO: 1432; SEQ ID NO: 648, SEQ ID NO: 805, SEQ ID NO: 962, SEQ ID NO: 1119, SEQ ID NO: 1276, and SEQ ID NO: 1433; SEQ ID NO: 649, SEQ ID NO: 806, SEQ ID NO: 963, SEQ ID NO: 1120, SEQ ID NO: 1277, and SEQ ID NO: 1434; SEQ ID NO: 650, SEQ ID NO: 807, SEQ ID NO: 964, SEQ ID NO: 1121, SEQ ID NO: 1278, and SEQ ID NO: 1435; SEQ ID NO: 651, SEQ ID NO: 808, SEQ ID NO: 965, SEQ ID NO: 1122, SEQ ID NO: 1279, and SEQ ID NO: 1436; SEQ ID NO: 652, SEQ ID NO: 809, SEQ ID NO: 966, SEQ ID NO: 1123, SEQ ID NO: 1280, and SEQ ID NO: 1437; SEQ ID NO: 653, SEQ ID NO: 810, SEQ ID NO: 967, SEQ ID NO: 1124, SEQ ID NO: 1281, and SEQ ID NO: 1438; SEQ ID NO: 654, SEQ ID NO: 811, SEQ ID NO: 968, SEQ ID NO: 1125, SEQ ID NO: 1282, and SEQ ID NO: 1439; SEQ ID NO: 655, SEQ ID NO: 812, SEQ ID NO: 969, SEQ ID NO: 1126, SEQ ID NO: 1283, and SEQ ID NO: 1440; SEQ ID NO: 656, SEQ ID NO: 813, SEQ ID NO: 970, SEQ ID NO: 1127, SEQ ID NO: 1284, and SEQ ID NO: 1441; SEQ ID NO: 657, SEQ ID NO: 814, SEQ ID NO: 971, SEQ ID NO: 1128, SEQ ID NO: 1285, and SEQ ID NO: 1442; SEQ ID NO: 658, SEQ ID NO: 815, SEQ ID NO: 972, SEQ ID NO: 1129, SEQ ID NO: 1286, and SEQ ID NO: 1443; SEQ ID NO: 659, SEQ ID NO: 816, SEQ ID NO: 973, SEQ ID NO: 1130, SEQ ID NO: 1287, and SEQ ID NO: 1444; SEQ ID NO: 660, SEQ ID NO: 817, SEQ ID NO: 974, SEQ ID NO: 1131, SEQ ID NO: 1288, and SEQ ID NO: 1445; SEQ ID NO: 661, SEQ ID NO: 818, SEQ ID NO: 975, SEQ ID NO: 1132, SEQ ID NO: 1289, and SEQ ID NO: 1446; SEQ ID NO: 662, SEQ ID NO: 819, SEQ ID NO: 976, SEQ ID NO: 1133, SEQ ID NO: 1290, and SEQ ID NO: 1447; SEQ ID NO: 663, SEQ ID NO: 820, SEQ ID NO: 977, SEQ ID NO: 1134, SEQ ID NO: 1291, and SEQ ID NO: 1448; SEQ ID NO: 664, SEQ ID NO: 821, SEQ ID NO: 978, SEQ ID NO: 1135, SEQ ID NO: 1292, and SEQ ID NO: 1449; SEQ ID NO: 665, SEQ ID NO: 822, SEQ ID NO: 979, SEQ ID NO: 1136, SEQ ID NO: 1293, and SEQ ID NO: 1450; SEQ ID NO: 666, SEQ ID NO: 823, SEQ ID NO: 980, SEQ ID NO: 1137, SEQ ID NO: 1294, and SEQ ID NO: 1451; SEQ ID NO: 667, SEQ ID NO: 824, SEQ ID NO: 981, SEQ ID NO: 1138, SEQ ID NO: 1295, and SEQ ID NO: 1452; SEQ ID NO: 668, SEQ ID NO: 825, SEQ ID NO: 982, SEQ ID NO: 1139, SEQ ID NO: 1296, and SEQ ID NO: 1453; SEQ ID NO: 669, SEQ ID NO: 826, SEQ ID NO: 983, SEQ ID NO: 1140, SEQ ID NO: 1297, and SEQ ID NO: 1454; SEQ ID NO: 670, SEQ ID NO: 827, SEQ ID NO: 984, SEQ ID NO: 1141, SEQ ID NO: 1298, and SEQ ID NO: 1455; SEQ ID NO: 671, SEQ ID NO: 828, SEQ ID NO: 985, SEQ ID NO: 1142, SEQ ID NO: 1299, and SEQ ID NO: 1456; SEQ ID NO: 672, SEQ ID NO: 829, SEQ ID NO: 986, SEQ ID NO: 1143, SEQ ID NO: 1300, and SEQ ID NO: 1457; SEQ ID NO: 673, SEQ ID NO: 830, SEQ ID NO: 987, SEQ ID NO: 1144, SEQ ID NO: 1301, and SEQ ID NO: 1458; SEQ ID NO: 674, SEQ ID NO: 831, SEQ ID NO: 988, SEQ ID NO: 1145, SEQ ID NO: 1302, and SEQ ID NO: 1459; SEQ ID NO: 675, SEQ ID NO: 832, SEQ ID NO: 989, SEQ ID NO: 1146, SEQ ID NO: 1303, and SEQ ID NO: 1460; SEQ ID NO: 676, SEQ ID NO: 833, SEQ ID NO: 990, SEQ ID NO: 1147, SEQ ID NO: 1304, and SEQ ID NO: 1461; SEQ ID NO: 677, SEQ ID NO: 834, SEQ ID NO: 991, SEQ ID NO: 1148, SEQ ID NO: 1305, and SEQ ID NO: 1462; SEQ ID NO: 678, SEQ ID NO: 835, SEQ ID NO: 992, SEQ ID NO: 1149, SEQ ID NO: 1306, and SEQ ID NO: 1463; SEQ ID NO: 679, SEQ ID NO: 836, SEQ ID NO: 993, SEQ ID NO: 1150, SEQ ID NO: 1307, and SEQ ID NO: 1464; SEQ ID NO: 680, SEQ ID NO: 837, SEQ ID NO: 994, SEQ ID NO: 1151, SEQ ID NO: 1308, and SEQ ID NO: 1465; SEQ ID NO: 681, SEQ ID NO: 838, SEQ ID NO: 995, SEQ ID NO: 1152, SEQ ID NO: 1309, and SEQ ID NO: 1466; SEQ ID NO: 682, SEQ ID NO: 839, SEQ ID NO: 996, SEQ ID NO: 1153, SEQ ID NO: 1310, and SEQ ID NO: 1467; SEQ ID NO: 683, SEQ ID NO: 840, SEQ ID NO: 997, SEQ ID NO: 1154, SEQ ID NO: 1311, and SEQ ID NO: 1468; SEQ ID NO: 684, SEQ ID NO: 841, SEQ ID NO: 998, SEQ ID NO: 1155, SEQ ID NO: 1312, and SEQ ID NO: 1469; SEQ ID NO: 685, SEQ ID NO: 842, SEQ ID NO: 999, SEQ ID NO: 1156, SEQ ID NO: 1313, and SEQ ID NO: 1470; SEQ ID NO: 686, SEQ ID NO: 843, SEQ ID NO: 1000, SEQ ID NO: 1157, SEQ ID NO: 1314, and SEQ ID NO: 1471; SEQ ID NO: 687, SEQ ID NO: 844, SEQ ID NO: 1001, SEQ ID NO: 1158, SEQ ID NO: 1315, and SEQ ID NO: 1472; SEQ ID NO: 688, SEQ ID NO: 845, SEQ ID NO: 1002, SEQ ID NO: 1159, SEQ ID NO: 1316, and SEQ ID NO: 1473; SEQ ID NO: 689, SEQ ID NO: 846, SEQ ID NO: 1003, SEQ ID NO: 1160, SEQ ID NO: 1317, and SEQ ID NO: 1474; SEQ ID NO: 690, SEQ ID NO: 847, SEQ ID NO: 1004, SEQ ID NO: 1161, SEQ ID NO: 1318, and SEQ ID NO: 1475; SEQ ID NO: 691, SEQ ID NO: 848, SEQ ID NO: 1005, SEQ ID NO: 1162, SEQ ID NO: 1319, and SEQ ID NO: 1476; SEQ ID NO: 692, SEQ ID NO: 849, SEQ ID NO: 1006, SEQ ID NO: 1163, SEQ ID NO: 1320, and SEQ ID NO: 1477; SEQ ID NO: 693, SEQ ID NO: 850, SEQ ID NO: 1007, SEQ ID NO: 1164, SEQ ID NO: 1321, and SEQ ID NO: 1478; SEQ ID NO: 694, SEQ ID NO: 851, SEQ ID NO: 1008, SEQ ID NO: 1165, SEQ ID NO: 1322, and SEQ ID NO: 1479; SEQ ID NO: 695, SEQ ID NO: 852, SEQ ID NO: 1009, SEQ ID NO: 1166, SEQ ID NO: 1323, and SEQ ID NO: 1480; SEQ ID NO: 696, SEQ ID NO: 853, SEQ ID NO: 1010, SEQ ID NO: 1167, SEQ ID NO: 1324, and SEQ ID NO: 1481; SEQ ID NO: 697, SEQ ID NO: 854, SEQ ID NO: 1011, SEQ ID NO: 1168, SEQ ID NO: 1325, and SEQ ID NO: 1482; SEQ ID NO: 698, SEQ ID NO: 855, SEQ ID NO: 1012, SEQ ID NO: 1169, SEQ ID NO: 1326, and SEQ ID NO: 1483; SEQ ID NO: 699, SEQ ID NO: 856, SEQ ID NO: 1013, SEQ ID NO: 1170, SEQ ID NO: 1327, and SEQ ID NO: 1484; SEQ ID NO: 700, SEQ ID NO: 857, SEQ ID NO: 1014, SEQ ID NO: 1171, SEQ ID NO: 1328, and SEQ ID NO: 1485; SEQ ID NO: 701, SEQ ID NO: 858, SEQ ID NO: 1015, SEQ ID NO: 1172, SEQ ID NO: 1329, and SEQ ID NO: 1486; SEQ ID NO: 702, SEQ ID NO: 859, SEQ ID NO: 1016, SEQ ID NO: 1173, SEQ ID NO: 1330, and SEQ ID NO: 1487; SEQ ID NO: 703, SEQ ID NO: 860, SEQ ID NO: 1017, SEQ ID NO: 1174, SEQ ID NO: 1331, and SEQ ID NO: 1488; SEQ ID NO: 704, SEQ ID NO: 861, SEQ ID NO: 1018, SEQ ID NO: 1175, SEQ ID NO: 1332, and SEQ ID NO: 1489; SEQ ID NO: 705, SEQ ID NO: 862, SEQ ID NO: 1019, SEQ ID NO: 1176, SEQ ID NO: 1333, and SEQ ID NO: 1490; SEQ ID NO: 706, SEQ ID NO: 863, SEQ ID NO: 1020, SEQ ID NO: 1177, SEQ ID NO: 1334, and SEQ ID NO: 1491; SEQ ID NO: 707, SEQ ID NO: 864, SEQ ID NO: 1021, SEQ ID NO: 1178, SEQ ID NO: 1335, and SEQ ID NO: 1492; SEQ ID NO: 708, SEQ ID NO: 865, SEQ ID NO: 1022, SEQ ID NO: 1179, SEQ ID NO: 1336, and SEQ ID NO: 1493; SEQ ID NO: 709, SEQ ID NO: 866, SEQ ID NO: 1023, SEQ ID NO: 1180, SEQ ID NO: 1337, and SEQ ID NO: 1494; SEQ ID NO: 710, SEQ ID NO: 867, SEQ ID NO: 1024, SEQ ID NO: 1181, SEQ ID NO: 1338, and SEQ ID NO: 1495; SEQ ID NO: 711, SEQ ID NO: 868, SEQ ID NO: 1025, SEQ ID NO: 1182, SEQ ID NO: 1339, and SEQ ID NO: 1496; SEQ ID NO: 712, SEQ ID NO: 869, SEQ ID NO: 1026, SEQ ID NO: 1183, SEQ ID NO: 1340, and SEQ ID NO: 1497; SEQ ID NO: 713, SEQ ID NO: 870, SEQ ID NO: 1027, SEQ ID NO: 1184, SEQ ID NO: 1341, and SEQ ID NO: 1498; SEQ ID NO: 714, SEQ ID NO: 871, SEQ ID NO: 1028, SEQ ID NO: 1185, SEQ ID NO: 1342, and SEQ ID NO: 1499; SEQ ID NO: 715, SEQ ID NO: 872, SEQ ID NO: 1029, SEQ ID NO: 1186, SEQ ID NO: 1343, and SEQ ID NO: 1500; SEQ ID NO: 716, SEQ ID NO: 873, SEQ ID NO: 1030, SEQ ID NO: 1187, SEQ ID NO: 1344, and SEQ ID NO: 1501; SEQ ID NO: 717, SEQ ID NO: 874, SEQ ID NO: 1031, SEQ ID NO: 1188, SEQ ID NO: 1345, and SEQ ID NO: 1502; SEQ ID NO: 718, SEQ ID NO: 875, SEQ ID NO: 1032, SEQ ID NO: 1189, SEQ ID NO: 1346, and SEQ ID NO: 1503; SEQ ID NO: 719, SEQ ID NO: 876, SEQ ID NO: 1033, SEQ ID NO: 1190, SEQ ID NO: 1347, and SEQ ID NO: 1504; SEQ ID NO: 720, SEQ ID NO: 877, SEQ ID NO: 1034, SEQ ID NO: 1191, SEQ ID NO: 1348, and SEQ ID NO: 1505; SEQ ID NO: 721, SEQ ID NO: 878, SEQ ID NO: 1035, SEQ ID NO: 1192, SEQ ID NO: 1349, and SEQ ID NO: 1506; SEQ ID NO: 722, SEQ ID NO: 879, SEQ ID NO: 1036, SEQ ID NO: 1193, SEQ ID NO: 1350, and SEQ ID NO: 1507; SEQ ID NO: 723, SEQ ID NO: 880, SEQ ID NO: 1037, SEQ ID NO: 1194, SEQ ID NO: 1351, and SEQ ID NO: 1508; SEQ ID NO: 724, SEQ ID NO: 881, SEQ ID NO: 1038, SEQ ID NO: 1195, SEQ ID NO: 1352, and SEQ ID NO: 1509; SEQ ID NO: 725, SEQ ID NO: 882, SEQ ID NO: 1039, SEQ ID NO: 1196, SEQ ID NO: 1353, and SEQ ID NO: 1510; SEQ ID NO: 726, SEQ ID NO: 883, SEQ ID NO: 1040, SEQ ID NO: 1197, SEQ ID NO: 1354, and SEQ ID NO: 1511; SEQ ID NO: 727, SEQ ID NO: 884, SEQ ID NO: 1041, SEQ ID NO: 1198, SEQ ID NO: 1355, and SEQ ID NO: 1512; SEQ ID NO: 728, SEQ ID NO: 885, SEQ ID NO: 1042, SEQ ID NO: 1199, SEQ ID NO: 1356, and SEQ ID NO: 1513; SEQ ID NO: 729, SEQ ID NO: 886, SEQ ID NO: 1043, SEQ ID NO: 1200, SEQ ID NO: 1357, and SEQ ID NO: 1514; SEQ ID NO: 730, SEQ ID NO: 887, SEQ ID NO: 1044, SEQ ID NO: 1201, SEQ ID NO: 1358, and SEQ ID NO: 1515; SEQ ID NO: 731, SEQ ID NO: 888, SEQ ID NO: 1045, SEQ ID NO: 1202, SEQ ID NO: 1359, and SEQ ID NO: 1516; SEQ ID NO: 732, SEQ ID NO: 889, SEQ ID NO: 1046, SEQ ID NO: 1203, SEQ ID NO: 1360, and SEQ ID NO: 1517; SEQ ID NO: 733, SEQ ID NO: 890, SEQ ID NO: 1047, SEQ ID NO: 1204, SEQ ID NO: 1361, and SEQ ID NO: 1518; SEQ ID NO: 734, SEQ ID NO: 891, SEQ ID NO: 1048, SEQ ID NO: 1205, SEQ ID NO: 1362, and SEQ ID NO: 1519; SEQ ID NO: 735, SEQ ID NO: 892, SEQ ID NO: 1049, SEQ ID NO: 1206, SEQ ID NO: 1363, and SEQ ID NO: 1520; SEQ ID NO: 736, SEQ ID NO: 893, SEQ ID NO: 1050, SEQ ID NO: 1207, SEQ ID NO: 1364, and SEQ ID NO: 1521; SEQ ID NO: 737, SEQ ID NO: 894, SEQ ID NO: 1051, SEQ ID NO: 1208, SEQ ID NO: 1365, and SEQ ID NO: 1522; SEQ ID NO: 738, SEQ ID NO: 895, SEQ ID NO: 1052, SEQ ID NO: 1209, SEQ ID NO: 1366, and SEQ ID NO: 1523; SEQ ID NO: 739, SEQ ID NO: 896, SEQ ID NO: 1053, SEQ ID NO: 1210, SEQ ID NO: 1367, and SEQ ID NO: 1524; SEQ ID NO: 740, SEQ ID NO: 897, SEQ ID NO: 1054, SEQ ID NO: 1211, SEQ ID NO: 1368, and SEQ ID NO: 1525; SEQ ID NO: 741, SEQ ID NO: 898, SEQ ID NO: 1055, SEQ ID NO: 1212, SEQ ID NO: 1369, and SEQ ID NO: 1526; SEQ ID NO: 742, SEQ ID NO: 899, SEQ ID NO: 1056, SEQ ID NO: 1213, SEQ ID NO: 1370, and SEQ ID NO: 1527; SEQ ID NO: 743, SEQ ID NO: 900, SEQ ID NO: 1057, SEQ ID NO: 1214, SEQ ID NO: 1371, and SEQ ID NO: 1528; SEQ ID NO: 744, SEQ ID NO: 901, SEQ ID NO: 1058, SEQ ID NO: 1215, SEQ ID NO: 1372, and SEQ ID NO: 1529; SEQ ID NO: 745, SEQ ID NO: 902, SEQ ID NO: 1059, SEQ ID NO: 1216, SEQ ID NO: 1373, and SEQ ID NO: 1530; SEQ ID NO: 746, SEQ ID NO: 903, SEQ ID NO: 1060, SEQ ID NO: 1217, SEQ ID NO: 1374, and SEQ ID NO: 1531; SEQ ID NO: 747, SEQ ID NO: 904, SEQ ID NO: 1061, SEQ ID NO: 1218, SEQ ID NO: 1375, and SEQ ID NO: 1532; SEQ ID NO: 748, SEQ ID NO: 905, SEQ ID NO: 1062, SEQ ID NO: 1219, SEQ ID NO: 1376, and SEQ ID NO: 1533; SEQ ID NO: 749, SEQ ID NO: 906, SEQ ID NO: 1063, SEQ ID NO: 1220, SEQ ID NO: 1377, and SEQ ID NO: 1534; SEQ ID NO: 750, SEQ ID NO: 907, SEQ ID NO: 1064, SEQ ID NO: 1221, SEQ ID NO: 1378, and SEQ ID NO: 1535; SEQ ID NO: 751, SEQ ID NO: 908, SEQ ID NO: 1065, SEQ ID NO: 1222, SEQ ID NO: 1379, and SEQ ID NO: 1536; SEQ ID NO: 752, SEQ ID NO: 909, SEQ ID NO: 1066, SEQ ID NO: 1223, SEQ ID NO: 1380, and SEQ ID NO: 1537; SEQ ID NO: 753, SEQ ID NO: 910, SEQ ID NO: 1067, SEQ ID NO: 1224, SEQ ID NO: 1381, and SEQ ID NO: 1538; SEQ ID NO: 754, SEQ ID NO: 911, SEQ ID NO: 1068, SEQ ID NO: 1225, SEQ ID NO: 1382, and SEQ ID NO: 1539; SEQ ID NO: 755, SEQ ID NO: 912, SEQ ID NO: 1069, SEQ ID NO: 1226, SEQ ID NO: 1383, and SEQ ID NO: 1540; SEQ ID NO: 756, SEQ ID NO: 913, SEQ ID NO: 1070, SEQ ID NO: 1227, SEQ ID NO: 1384, and SEQ ID NO: 1541; SEQ ID NO: 757, SEQ ID NO: 914, SEQ ID NO: 1071, SEQ ID NO: 1228, SEQ ID NO: 1385, and SEQ ID NO: 1542; SEQ ID NO: 758, SEQ ID NO: 915, SEQ ID NO: 1072, SEQ ID NO: 1229, SEQ ID NO: 1386, and SEQ ID NO: 1543; SEQ ID NO: 759, SEQ ID NO: 916, SEQ ID NO: 1073, SEQ ID NO: 1230, SEQ ID NO: 1387, and SEQ ID NO: 1544; SEQ ID NO: 760, SEQ ID NO: 917, SEQ ID NO: 1074, SEQ ID NO: 1231, SEQ ID NO: 1388, and SEQ ID NO: 1545; SEQ ID NO: 761, SEQ ID NO: 918, SEQ ID NO: 1075, SEQ ID NO: 1232, SEQ ID NO: 1389, and SEQ ID NO: 1546; SEQ ID NO: 762, SEQ ID NO: 919, SEQ ID NO: 1076, SEQ ID NO: 1233, SEQ ID NO: 1390, and SEQ ID NO: 1547; SEQ ID NO: 763, SEQ ID NO: 920, SEQ ID NO: 1077, SEQ ID NO: 1234, SEQ ID NO: 1391, and SEQ ID NO: 1548; SEQ ID NO: 764, SEQ ID NO: 921, SEQ ID NO: 1078, SEQ ID NO: 1235, SEQ ID NO: 1392, and SEQ ID NO: 1549; SEQ ID NO: 765, SEQ ID NO: 922, SEQ ID NO: 1079, SEQ ID NO: 1236, SEQ ID NO: 1393, and SEQ ID NO: 1550; SEQ ID NO: 766, SEQ ID NO: 923, SEQ ID NO: 1080, SEQ ID NO: 1237, SEQ ID NO: 1394, and SEQ ID NO: 1551; SEQ ID NO: 767, SEQ ID NO: 924, SEQ ID NO: 1081, SEQ ID NO: 1238, SEQ ID NO: 1395, and SEQ ID NO: 1552; SEQ ID NO: 768, SEQ ID NO: 925, SEQ ID NO: 1082, SEQ ID NO: 1239, SEQ ID NO: 1396, and SEQ ID NO: 1553; SEQ ID NO: 769, SEQ ID NO: 926, SEQ ID NO: 1083, SEQ ID NO: 1240, SEQ ID NO: 1397, and SEQ ID NO: 1554; SEQ ID NO: 770, SEQ ID NO: 927, SEQ ID NO: 1084, SEQ ID NO: 1241, SEQ ID NO: 1398, and SEQ ID NO: 1555; SEQ ID NO: 771, SEQ ID NO: 928, SEQ ID NO: 1085, SEQ ID NO: 1242, SEQ ID NO: 1399, and SEQ ID NO: 1556; SEQ ID NO: 772, SEQ ID NO: 929, SEQ ID NO: 1086, SEQ ID NO: 1243, SEQ ID NO: 1400, and SEQ ID NO: 1557; SEQ ID NO: 773, SEQ ID NO: 930, SEQ ID NO: 1087, SEQ ID NO: 1244, SEQ ID NO: 1401, and SEQ ID NO: 1558; SEQ ID NO: 774, SEQ ID NO: 931, SEQ ID NO: 1088, SEQ ID NO: 1245, SEQ ID NO: 1402, and SEQ ID NO: 1559; SEQ ID NO: 775, SEQ ID NO: 932, SEQ ID NO: 1089, SEQ ID NO: 1246, SEQ ID NO: 1403, and SEQ ID NO: 1560; SEQ ID NO: 776, SEQ ID NO: 933, SEQ ID NO: 1090, SEQ ID NO: 1247, SEQ ID NO: 1404, and SEQ ID NO: 1561; SEQ ID NO: 777, SEQ ID NO: 934, SEQ ID NO: 1091, SEQ ID NO: 1248, SEQ ID NO: 1405, and SEQ ID NO: 1562; SEQ ID NO: 778, SEQ ID NO: 935, SEQ ID NO: 1092, SEQ ID NO: 1249, SEQ ID NO: 1406, and SEQ ID NO: 1563; SEQ ID NO: 779, SEQ ID NO: 936, SEQ ID NO: 1093, SEQ ID NO: 1250, SEQ ID NO: 1407, and SEQ ID NO: 1564; SEQ ID NO: 780, SEQ ID NO: 937, SEQ ID NO: 1094, SEQ ID NO: 1251, SEQ ID NO: 1408, and SEQ ID NO: 1565; SEQ ID NO: 781, SEQ ID NO: 938, SEQ ID NO: 1095, SEQ ID NO: 1252, SEQ ID NO: 1409, and SEQ ID NO: 1566; SEQ ID NO: 782, SEQ ID NO: 939, SEQ ID NO: 1096, SEQ ID NO: 1253, SEQ ID NO: 1410, and SEQ ID NO: 1567; SEQ ID NO: 783, SEQ ID NO: 940, SEQ ID NO: 1097, SEQ ID NO: 1254, SEQ ID NO: 1411, and SEQ ID NO: 1568; SEQ ID NO: 784, SEQ ID NO: 941, SEQ ID NO: 1098, SEQ ID NO: 1255, SEQ ID NO: 1412, and SEQ ID NO: 1569; and SEQ ID NO: 785, SEQ ID NO: 942, SEQ ID NO: 1099, SEQ ID NO: 1256, SEQ ID NO: 1413, and SEQ ID NO: 1570.

12. The composition of claim 3, wherein said antibody or functional fragment thereof is an antibody or a fragment thereof, and wherein said antibody or fragment thereof comprises a light chain variable region comprising a sequence selected from the group consisting of SEQ ID NOs: 1-157 and a heavy chain variable region comprising a sequence selected from the group consisting of SEQ ID NOs: 158-31.

13. The composition of claim 3, wherein said antibody or functional fragment thereof is an antibody or a fragment thereof, and wherein said antibody or fragment thereof comprises a combination of a light chain variable region and a heavy chain variable region selected from the group consisting of a light chain variable region comprising SEQ ID NO: 1 and a heavy chain variable region comprising SEQ ID NO: 158; a light chain variable region comprising SEQ ID NO: 2 and a heavy chain variable region comprising SEQ ID NO: 159; a light chain variable region comprising SEQ ID NO: 3 and a heavy chain variable region comprising SEQ ID NO: 160; a light chain variable region comprising SEQ ID NO: 4 and a heavy chain variable region comprising SEQ ID NO: 161; a light chain variable region comprising SEQ ID NO: 5 and a heavy chain variable region comprising SEQ ID NO: 162; a light chain variable region comprising SEQ ID NO: 6 and a heavy chain variable region comprising SEQ ID NO: 163; a light chain variable region comprising SEQ ID NO: 7 and a heavy chain variable region comprising SEQ ID NO: 164; a light chain variable region comprising SEQ ID NO: 8 and a heavy chain variable region comprising SEQ ID NO: 165; a light chain variable region comprising SEQ ID NO: 9 and a heavy chain variable region comprising SEQ ID NO: 166; a light chain variable region comprising SEQ ID NO: 10 and a heavy chain variable region comprising SEQ ID NO: 167; a light chain variable region comprising SEQ ID NO: 11 and a heavy chain variable region comprising SEQ ID NO: 168; a light chain variable region comprising SEQ ID NO: 12 and a heavy chain variable region comprising SEQ ID NO: 169; a light chain variable region comprising SEQ ID NO: 13 and a heavy chain variable region comprising SEQ ID NO: 170; a light chain variable region comprising SEQ ID NO: 14 and a heavy chain variable region comprising SEQ ID NO: 171; a light chain variable region comprising SEQ ID NO: 15 and a heavy chain variable region comprising SEQ ID NO: 172; a light chain variable region comprising SEQ ID NO: 16 and a heavy chain variable region comprising SEQ ID NO: 173; a light chain variable region comprising SEQ ID NO: 17 and a heavy chain variable region comprising SEQ ID NO: 174; a light chain variable region comprising SEQ ID NO: 18 and a heavy chain variable region comprising SEQ ID NO: 175; a light chain variable region comprising SEQ ID NO: 19 and a heavy chain variable region comprising SEQ ID NO: 176; a light chain variable region comprising SEQ ID NO: 20 and a heavy chain variable region comprising SEQ ID NO: 177; a light chain variable region comprising SEQ ID NO: 21 and a heavy chain variable region comprising SEQ ID NO: 178; a light chain variable region comprising SEQ ID NO: 22 and a heavy chain variable region comprising SEQ ID NO: 179; a light chain variable region comprising SEQ ID NO: 23 and a heavy chain variable region comprising SEQ ID NO: 180; a light chain variable region comprising SEQ ID NO: 24 and a heavy chain variable region comprising SEQ ID NO: 181; a light chain variable region comprising SEQ ID NO: 25 and a heavy chain variable region comprising SEQ ID NO: 182; a light chain variable region comprising SEQ ID NO: 26 and a heavy chain variable region comprising SEQ ID NO: 183; a light chain variable region comprising SEQ ID NO: 27 and a heavy chain variable region comprising SEQ ID NO: 184; a light chain variable region comprising SEQ ID NO: 28 and a heavy chain variable region comprising SEQ ID NO: 185; a light chain variable region comprising SEQ ID NO: 29 and a heavy chain variable region comprising SEQ ID NO: 186; a light chain variable region comprising SEQ ID NO: 30 and a heavy chain variable region comprising SEQ ID NO: 187; a light chain variable region comprising SEQ ID NO: 31 and a heavy chain variable region comprising SEQ ID NO: 188; a light chain variable region comprising SEQ ID NO: 32 and a heavy chain variable region comprising SEQ ID NO: 189; a light chain variable region comprising SEQ ID NO: 33 and a heavy chain variable region comprising SEQ ID NO: 190; a light chain variable region comprising SEQ ID NO: 34 and a heavy chain variable region comprising SEQ ID NO: 191; a light chain variable region comprising SEQ ID NO: 35 and a heavy chain variable region comprising SEQ ID NO: 192; a light chain variable region comprising SEQ ID NO: 36 and a heavy chain variable region comprising SEQ ID NO: 193; a light chain variable region comprising SEQ ID NO: 37 and a heavy chain variable region comprising SEQ ID NO: 194; a light chain variable region comprising SEQ ID NO: 38 and a heavy chain variable region comprising SEQ ID NO: 195; a light chain variable region comprising SEQ ID NO: 39 and a heavy chain variable region comprising SEQ ID NO: 196; a light chain variable region comprising SEQ ID NO: 40 and a heavy chain variable region comprising SEQ ID NO: 197; a light chain variable region comprising SEQ ID NO: 41 and a heavy chain variable region comprising SEQ ID NO: 198; a light chain variable region comprising SEQ ID NO: 42 and a heavy chain variable region comprising SEQ ID NO: 199; a light chain variable region comprising SEQ ID NO: 43 and a heavy chain variable region comprising SEQ ID NO: 200; a light chain variable region comprising SEQ ID NO: 44 and a heavy chain variable region comprising SEQ ID NO: 201; a light chain variable region comprising SEQ ID NO: 45 and a heavy chain variable region comprising SEQ ID NO: 202; a light chain variable region comprising SEQ ID NO: 46 and a heavy chain variable region comprising SEQ ID NO: 203; a light chain variable region comprising SEQ ID NO: 47 and a heavy chain variable region comprising SEQ ID NO: 204; a light chain variable region comprising SEQ ID NO: 48 and a heavy chain variable region comprising SEQ ID NO: 205; a light chain variable region comprising SEQ ID NO: 49 and a heavy chain variable region comprising SEQ ID NO: 206; a light chain variable region comprising SEQ ID NO: 50 and a heavy chain variable region comprising SEQ ID NO: 207; a light chain variable region comprising SEQ ID NO: 51 and a heavy chain variable region comprising SEQ ID NO: 208; a light chain variable region comprising SEQ ID NO: 52 and a heavy chain variable region comprising SEQ ID NO: 209; a light chain variable region comprising SEQ ID NO: 53 and a heavy chain variable region comprising SEQ ID NO: 210; a light chain variable region comprising SEQ ID NO: 54 and a heavy chain variable region comprising SEQ ID NO: 211; a light chain variable region comprising SEQ ID NO: 55 and a heavy chain variable region comprising SEQ ID NO: 212; a light chain variable region comprising SEQ ID NO: 56 and a heavy chain variable region comprising SEQ ID NO: 213; a light chain variable region comprising SEQ ID NO: 57 and a heavy chain variable region comprising SEQ ID NO: 214; a light chain variable region comprising SEQ ID NO: 58 and a heavy chain variable region comprising SEQ ID NO: 215; a light chain variable region comprising SEQ ID NO: 59 and a heavy chain variable region comprising SEQ ID NO: 216; a light chain variable region comprising SEQ ID NO: 60 and a heavy chain variable region comprising SEQ ID NO: 217; a light chain variable region comprising SEQ ID NO: 61 and a heavy chain variable region comprising SEQ ID NO: 218; a light chain variable region comprising SEQ ID NO: 62 and a heavy chain variable region comprising SEQ ID NO: 219; a light chain variable region comprising SEQ ID NO: 63 and a heavy chain variable region comprising SEQ ID NO: 220; a light chain variable region comprising SEQ ID NO: 64 and a heavy chain variable region comprising SEQ ID NO: 221; a light chain variable region comprising SEQ ID NO: 65 and a heavy chain variable region comprising SEQ ID NO: 222; a light chain variable region comprising SEQ ID NO: 66 and a heavy chain variable region comprising SEQ ID NO: 223; a light chain variable region comprising SEQ ID NO: 67 and a heavy chain variable region comprising SEQ ID NO: 224; a light chain variable region comprising SEQ ID NO: 68 and a heavy chain variable region comprising SEQ ID NO: 225; a light chain variable region comprising SEQ ID NO: 69 and a heavy chain variable region comprising SEQ ID NO: 226; a light chain variable region comprising SEQ ID NO: 70 and a heavy chain variable region comprising SEQ ID NO: 227; a light chain variable region comprising SEQ ID NO: 71 and a heavy chain variable region comprising SEQ ID NO: 228; a light chain variable region comprising SEQ ID NO: 72 and a heavy chain variable region comprising SEQ ID NO: 229; a light chain variable region comprising SEQ ID NO: 73 and a heavy chain variable region comprising SEQ ID NO: 230; a light chain variable region comprising SEQ ID NO: 74 and a heavy chain variable region comprising SEQ ID NO: 231; a light chain variable region comprising SEQ ID NO: 75 and a heavy chain variable region comprising SEQ ID NO: 232; a light chain variable region comprising SEQ ID NO: 76 and a heavy chain variable region comprising SEQ ID NO: 233; a light chain variable region comprising SEQ ID NO: 77 and a heavy chain variable region comprising SEQ ID NO: 234; a light chain variable region comprising SEQ ID NO: 78 and a heavy chain variable region comprising SEQ ID NO: 235; a light chain variable region comprising SEQ ID NO: 79 and a heavy chain variable region comprising SEQ ID NO: 236; a light chain variable region comprising SEQ ID NO: 80 and a heavy chain variable region comprising SEQ ID NO: 237; a light chain variable region comprising SEQ ID NO: 81 and a heavy chain variable region comprising SEQ ID NO: 238; a light chain variable region comprising SEQ ID NO: 82 and a heavy chain variable region comprising SEQ ID NO: 239; a light chain variable region comprising SEQ ID NO: 83 and a heavy chain variable region comprising SEQ ID NO: 240; a light chain variable region comprising SEQ ID NO: 84 and a heavy chain variable region comprising SEQ ID NO: 241; a light chain variable region comprising SEQ ID NO: 85 and a heavy chain variable region comprising SEQ ID NO: 242; a light chain variable region comprising SEQ ID NO: 86 and a heavy chain variable region comprising SEQ ID NO: 243; a light chain variable region comprising SEQ ID NO: 87 and a heavy chain variable region comprising SEQ ID NO: 244; a light chain variable region comprising SEQ ID NO: 88 and a heavy chain variable region comprising SEQ ID NO: 245; a light chain variable region comprising SEQ ID NO: 89 and a heavy chain variable region comprising SEQ ID NO: 246; a light chain variable region comprising SEQ ID NO: 90 and a heavy chain variable region comprising SEQ ID NO: 247; a light chain variable region comprising SEQ ID NO: 91 and a heavy chain variable region comprising SEQ ID NO: 248; a light chain variable region comprising SEQ ID NO: 92 and a heavy chain variable region comprising SEQ ID NO: 249; a light chain variable region comprising SEQ ID NO: 93 and a heavy chain variable region comprising SEQ ID NO: 250; a light chain variable region comprising SEQ ID NO: 94 and a heavy chain variable region comprising SEQ ID NO: 251; a light chain variable region comprising SEQ ID NO: 95 and a heavy chain variable region comprising SEQ ID NO: 252; a light chain variable region comprising SEQ ID NO: 96 and a heavy chain variable region comprising SEQ ID NO: 253; a light chain variable region comprising SEQ ID NO: 97 and a heavy chain variable region comprising SEQ ID NO: 254; a light chain variable region comprising SEQ ID NO: 98 and a heavy chain variable region comprising SEQ ID NO: 255; a light chain variable region comprising SEQ ID NO: 99 and a heavy chain variable region comprising SEQ ID NO: 256; a light chain variable region comprising SEQ ID NO: 100 and a heavy chain variable region comprising SEQ ID NO: 257; a light chain variable region comprising SEQ ID NO: 101 and a heavy chain variable region comprising SEQ ID NO: 258; a light chain variable region comprising SEQ ID NO: 102 and a heavy chain variable region comprising SEQ ID NO: 259; a light chain variable region comprising SEQ ID NO: 103 and a heavy chain variable region comprising SEQ ID NO: 260; a light chain variable region comprising SEQ ID NO: 104 and a heavy chain variable region comprising SEQ ID NO: 261; a light chain variable region comprising SEQ ID NO: 105 and a heavy chain variable region comprising SEQ ID NO: 262; a light chain variable region comprising SEQ ID NO: 106 and a heavy chain variable region comprising SEQ ID NO: 263; a light chain variable region comprising SEQ ID NO: 107 and a heavy chain variable region comprising SEQ ID NO: 264; a light chain variable region comprising SEQ ID NO: 108 and a heavy chain variable region comprising SEQ ID NO: 265; a light chain variable region comprising SEQ ID NO: 109 and a heavy chain variable region comprising SEQ ID NO: 266; a light chain variable region comprising SEQ ID NO: 110 and a heavy chain variable region comprising SEQ ID NO: 267; a light chain variable region comprising SEQ ID NO: 111 and a heavy chain variable region comprising SEQ ID NO: 268; a light chain variable region comprising SEQ ID NO: 112 and a heavy chain variable region comprising SEQ ID NO: 269; a light chain variable region comprising SEQ ID NO: 113 and a heavy chain variable region comprising SEQ ID NO: 270; a light chain variable region comprising SEQ ID NO: 114 and a heavy chain variable region comprising SEQ ID NO: 271; a light chain variable region comprising SEQ ID NO: 115 and a heavy chain variable region comprising SEQ ID NO: 272; a light chain variable region comprising SEQ ID NO: 116 and a heavy chain variable region comprising SEQ ID NO: 273; a light chain variable region comprising SEQ ID NO: 117 and a heavy chain variable region comprising SEQ ID NO: 274; a light chain variable region comprising SEQ ID NO: 118 and a heavy chain variable region comprising SEQ ID NO: 275; a light chain variable region comprising SEQ ID NO: 119 and a heavy chain variable region comprising SEQ ID NO: 276; a light chain variable region comprising SEQ ID NO: 120 and a heavy chain variable region comprising SEQ ID NO: 277; a light chain variable region comprising SEQ ID NO: 121 and a heavy chain variable region comprising SEQ ID NO: 278; a light chain variable region comprising SEQ ID NO: 122 and a heavy chain variable region comprising SEQ ID NO: 279; a light chain variable region comprising SEQ ID NO: 123 and a heavy chain variable region comprising SEQ ID NO: 280; a light chain variable region comprising SEQ ID NO: 124 and a heavy chain variable region comprising SEQ ID NO: 281; a light chain variable region comprising SEQ ID NO: 125 and a heavy chain variable region comprising SEQ ID NO: 282; a light chain variable region comprising SEQ ID NO: 126 and a heavy chain variable region comprising SEQ ID NO: 283; a light chain variable region comprising SEQ ID NO: 127 and a heavy chain variable region comprising SEQ ID NO: 284; a light chain variable region comprising SEQ ID NO: 128 and a heavy chain variable region comprising SEQ ID NO: 285; a light chain variable region comprising SEQ ID NO: 129 and a heavy chain variable region comprising SEQ ID NO: 286; a light chain variable region comprising SEQ ID NO: 130 and a heavy chain variable region comprising SEQ ID NO: 287; a light chain variable region comprising SEQ ID NO: 131 and a heavy chain variable region comprising SEQ ID NO: 288; a light chain variable region comprising SEQ ID NO: 132 and a heavy chain variable region comprising SEQ ID NO: 289; a light chain variable region comprising SEQ ID NO: 133 and a heavy chain variable region comprising SEQ ID NO: 290; a light chain variable region comprising SEQ ID NO: 134 and a heavy chain variable region comprising SEQ ID NO: 291; a light chain variable region comprising SEQ ID NO: 135 and a heavy chain variable region comprising SEQ ID NO: 292; a light chain variable region comprising SEQ ID NO: 136 and a heavy chain variable region comprising SEQ ID NO: 293; a light chain variable region comprising SEQ ID NO: 137 and a heavy chain variable region comprising SEQ ID NO: 294; a light chain variable region comprising SEQ ID NO: 138 and a heavy chain variable region comprising SEQ ID NO: 295; a light chain variable region comprising SEQ ID NO: 139 and a heavy chain variable region comprising SEQ ID NO: 296; a light chain variable region comprising SEQ ID NO: 140 and a heavy chain variable region comprising SEQ ID NO: 297; a light chain variable region comprising SEQ ID NO: 141 and a heavy chain variable region comprising SEQ ID NO: 298; a light chain variable region comprising SEQ ID NO: 142 and a heavy chain variable region comprising SEQ ID NO: 299; a light chain variable region comprising SEQ ID NO: 143 and a heavy chain variable region comprising SEQ ID NO: 300; a light chain variable region comprising SEQ ID NO: 144 and a heavy chain variable region comprising SEQ ID NO: 301; a light chain variable region comprising SEQ ID NO: 145 and a heavy chain variable region comprising SEQ ID NO: 302; a light chain variable region comprising SEQ ID NO: 146 and a heavy chain variable region comprising SEQ ID NO: 303; a light chain variable region comprising SEQ ID NO: 147 and a heavy chain variable region comprising SEQ ID NO: 304; a light chain variable region comprising SEQ ID NO: 148 and a heavy chain variable region comprising SEQ ID NO: 305; a light chain variable region comprising SEQ ID NO: 149 and a heavy chain variable region comprising SEQ ID NO: 306; a light chain variable region comprising SEQ ID NO: 150 and a heavy chain variable region comprising SEQ ID NO: 307; a light chain variable region comprising SEQ ID NO: 151 and a heavy chain variable region comprising SEQ ID NO: 308; a light chain variable region comprising SEQ ID NO: 152 and a heavy chain variable region comprising SEQ ID NO: 309; a light chain variable region comprising SEQ ID NO: 153 and a heavy chain variable region comprising SEQ ID NO: 310; a light chain variable region comprising SEQ ID NO: 154 and a heavy chain variable region comprising SEQ ID NO: 311; a light chain variable region comprising SEQ ID NO: 155 and a heavy chain variable region comprising SEQ ID NO: 312; a light chain variable region comprising SEQ ID NO: 156 and a heavy chain variable region comprising SEQ ID NO: 313; and a light chain variable region comprising SEQ ID NO: 157 and a heavy chain variable region comprising SEQ ID NO: 314.

14. The composition of claim 3, wherein said antibody or functional fragment thereof is an antibody, and wherein said antibody comprises a light chain comprising a sequence selected from the group consisting of SEQ ID NOs: 315-471 and a heavy chain comprising a sequence selected from the group consisting of SEQ ID NOs: 472-628.

15. The composition of claim 3, wherein said antibody or functional fragment thereof is an antibody, and wherein said antibody comprises a combination of a light chain and a heavy chain selected from the group consisting of a light chain comprising SEQ ID NO: 315 and a heavy chain comprising SEQ ID NO: 472; a light chain comprising SEQ ID NO: 316 and a heavy chain comprising SEQ ID NO: 473; a light chain comprising SEQ ID NO: 317 and a heavy chain comprising SEQ ID NO: 474; a light chain comprising SEQ ID NO: 318 and a heavy chain comprising SEQ ID NO: 475; a light chain comprising SEQ ID NO: 319 and a heavy chain comprising SEQ ID NO: 476; a light chain comprising SEQ ID NO: 320 and a heavy chain comprising SEQ ID NO: 477; a light chain comprising SEQ ID NO: 321 and a heavy chain comprising SEQ ID NO: 478; a light chain comprising SEQ ID NO: 322 and a heavy chain comprising SEQ ID NO: 479; a light chain comprising SEQ ID NO: 323 and a heavy chain comprising SEQ ID NO: 480; a light chain comprising SEQ ID NO: 324 and a heavy chain comprising SEQ ID NO: 481; a light chain comprising SEQ ID NO: 325 and a heavy chain comprising SEQ ID NO: 482; a light chain comprising SEQ ID NO: 326 and a heavy chain comprising SEQ ID NO: 483; a light chain comprising SEQ ID NO: 327 and a heavy chain comprising SEQ ID NO: 484; a light chain comprising SEQ ID NO: 328 and a heavy chain comprising SEQ ID NO: 485; a light chain comprising SEQ ID NO: 329 and a heavy chain comprising SEQ ID NO: 486; a light chain comprising SEQ ID NO: 330 and a heavy chain comprising SEQ ID NO: 487; a light chain comprising SEQ ID NO: 331 and a heavy chain comprising SEQ ID NO: 488; a light chain comprising SEQ ID NO: 332 and a heavy chain comprising SEQ ID NO: 489; a light chain comprising SEQ ID NO: 333 and a heavy chain comprising SEQ ID NO: 490; a light chain comprising SEQ ID NO: 334 and a heavy chain comprising SEQ ID NO: 491; a light chain comprising SEQ ID NO: 335 and a heavy chain comprising SEQ ID NO: 492; a light chain comprising SEQ ID NO: 336 and a heavy chain comprising SEQ ID NO: 493; a light chain comprising SEQ ID NO: 337 and a heavy chain comprising SEQ ID NO: 494; a light chain comprising SEQ ID NO: 338 and a heavy chain comprising SEQ ID NO: 495; a light chain comprising SEQ ID NO: 339 and a heavy chain comprising SEQ ID NO: 496; a light chain comprising SEQ ID NO: 340 and a heavy chain comprising SEQ ID NO: 497; a light chain comprising SEQ ID NO: 341 and a heavy chain comprising SEQ ID NO: 498; a light chain comprising SEQ ID NO: 342 and a heavy chain comprising SEQ ID NO: 499; a light chain comprising SEQ ID NO: 343 and a heavy chain comprising SEQ ID NO: 500; a light chain comprising SEQ ID NO: 344 and a heavy chain comprising SEQ ID NO: 501; a light chain comprising SEQ ID NO: 345 and a heavy chain comprising SEQ ID NO: 502; a light chain comprising SEQ ID NO: 346 and a heavy chain comprising SEQ ID NO: 503; a light chain comprising SEQ ID NO: 347 and a heavy chain comprising SEQ ID NO: 504; a light chain comprising SEQ ID NO: 348 and a heavy chain comprising SEQ ID NO: 505; a light chain comprising SEQ ID NO: 349 and a heavy chain comprising SEQ ID NO: 506; a light chain comprising SEQ ID NO: 350 and a heavy chain comprising SEQ ID NO: 507; a light chain comprising SEQ ID NO: 351 and a heavy chain comprising SEQ ID NO: 508; a light chain comprising SEQ ID NO: 352 and a heavy chain comprising SEQ ID NO: 509; a light chain comprising SEQ ID NO: 353 and a heavy chain comprising SEQ ID NO: 510; a light chain comprising SEQ ID NO: 354 and a heavy chain comprising SEQ ID NO: 511; a light chain comprising SEQ ID NO: 355 and a heavy chain comprising SEQ ID NO: 512; a light chain comprising SEQ ID NO: 356 and a heavy chain comprising SEQ ID NO: 513; a light chain comprising SEQ ID NO: 357 and a heavy chain comprising SEQ ID NO: 514; a light chain comprising SEQ ID NO: 358 and a heavy chain comprising SEQ ID NO: 515; a light chain comprising SEQ ID NO: 359 and a heavy chain comprising SEQ ID NO: 516; a light chain comprising SEQ ID NO: 360 and a heavy chain comprising SEQ ID NO: 517; a light chain comprising SEQ ID NO: 361 and a heavy chain comprising SEQ ID NO: 518; a light chain comprising SEQ ID NO: 362 and a heavy chain comprising SEQ ID NO: 519; a light chain comprising SEQ ID NO: 363 and a heavy chain comprising SEQ ID NO: 520; a light chain comprising SEQ ID NO: 364 and a heavy chain comprising SEQ ID NO: 521; a light chain comprising SEQ ID NO: 365 and a heavy chain comprising SEQ ID NO: 522; a light chain comprising SEQ ID NO: 366 and a heavy chain comprising SEQ ID NO: 523; a light chain comprising SEQ ID NO: 367 and a heavy chain comprising SEQ ID NO: 524; a light chain comprising SEQ ID NO: 368 and a heavy chain comprising SEQ ID NO: 525; a light chain comprising SEQ ID NO: 369 and a heavy chain comprising SEQ ID NO: 526; a light chain comprising SEQ ID NO: 370 and a heavy chain comprising SEQ ID NO: 527; a light chain comprising SEQ ID NO: 371 and a heavy chain comprising SEQ ID NO: 528; a light chain comprising SEQ ID NO: 372 and a heavy chain comprising SEQ ID NO: 529; a light chain comprising SEQ ID NO: 373 and a heavy chain comprising SEQ ID NO: 530; a light chain comprising SEQ ID NO: 374 and a heavy chain comprising SEQ ID NO: 531; a light chain comprising SEQ ID NO: 375 and a heavy chain comprising SEQ ID NO: 532; a light chain comprising SEQ ID NO: 376 and a heavy chain comprising SEQ ID NO: 533; a light chain comprising SEQ ID NO: 377 and a heavy chain comprising SEQ ID NO: 534; a light chain comprising SEQ ID NO: 378 and a heavy chain comprising SEQ ID NO: 535; a light chain comprising SEQ ID NO: 379 and a heavy chain comprising SEQ ID NO: 536; a light chain comprising SEQ ID NO: 380 and a heavy chain comprising SEQ ID NO: 537; a light chain comprising SEQ ID NO: 381 and a heavy chain comprising SEQ ID NO: 538; a light chain comprising SEQ ID NO: 382 and a heavy chain comprising SEQ ID NO: 539; a light chain comprising SEQ ID NO: 383 and a heavy chain comprising SEQ ID NO: 540; a light chain comprising SEQ ID NO: 384 and a heavy chain comprising SEQ ID NO: 541; a light chain comprising SEQ ID NO: 385 and a heavy chain comprising SEQ ID NO: 542; a light chain comprising SEQ ID NO: 386 and a heavy chain comprising SEQ ID NO: 543; a light chain comprising SEQ ID NO: 387 and a heavy chain comprising SEQ ID NO: 544; a light chain comprising SEQ ID NO: 388 and a heavy chain comprising SEQ ID NO: 545; a light chain comprising SEQ ID NO: 389 and a heavy chain comprising SEQ ID NO: 546; a light chain comprising SEQ ID NO: 390 and a heavy chain comprising SEQ ID NO: 547; a light chain comprising SEQ ID NO: 391 and a heavy chain comprising SEQ ID NO: 548; a light chain comprising SEQ ID NO: 392 and a heavy chain comprising SEQ ID NO: 549; a light chain comprising SEQ ID NO: 393 and a heavy chain comprising SEQ ID NO: 550; a light chain comprising SEQ ID NO: 394 and a heavy chain comprising SEQ ID NO: 551; a light chain comprising SEQ ID NO: 395 and a heavy chain comprising SEQ ID NO: 552; a light chain comprising SEQ ID NO: 396 and a heavy chain comprising SEQ ID NO: 553; a light chain comprising SEQ ID NO: 397 and a heavy chain comprising SEQ ID NO: 554; a light chain comprising SEQ ID NO: 398 and a heavy chain comprising SEQ ID NO: 555; a light chain comprising SEQ ID NO: 399 and a heavy chain comprising SEQ ID NO: 556; a light chain comprising SEQ ID NO: 400 and a heavy chain comprising SEQ ID NO: 557; a light chain comprising SEQ ID NO: 401 and a heavy chain comprising SEQ ID NO: 558; a light chain comprising SEQ ID NO: 402 and a heavy chain comprising SEQ ID NO: 559; a light chain comprising SEQ ID NO: 403 and a heavy chain comprising SEQ ID NO: 560; a light chain comprising SEQ ID NO: 404 and a heavy chain comprising SEQ ID NO: 561; a light chain comprising SEQ ID NO: 405 and a heavy chain comprising SEQ ID NO: 562; a light chain comprising SEQ ID NO: 406 and a heavy chain comprising SEQ ID NO: 563; a light chain comprising SEQ ID NO: 407 and a heavy chain comprising SEQ ID NO: 564; a light chain comprising SEQ ID NO: 408 and a heavy chain comprising SEQ ID NO: 565; a light chain comprising SEQ ID NO: 409 and a heavy chain comprising SEQ ID NO: 566; a light chain comprising SEQ ID NO: 410 and a heavy chain comprising SEQ ID NO: 567; a light chain comprising SEQ ID NO: 411 and a heavy chain comprising SEQ ID NO: 568; a light chain comprising SEQ ID NO: 412 and a heavy chain comprising SEQ ID NO: 569; a light chain comprising SEQ ID NO: 413 and a heavy chain comprising SEQ ID NO: 570; a light chain comprising SEQ ID NO: 414 and a heavy chain comprising SEQ ID NO: 571; a light chain comprising SEQ ID NO: 415 and a heavy chain comprising SEQ ID NO: 572; a light chain comprising SEQ ID NO: 416 and a heavy chain comprising SEQ ID NO: 573; a light chain comprising SEQ ID NO: 417 and a heavy chain comprising SEQ ID NO: 574; a light chain comprising SEQ ID NO: 418 and a heavy chain comprising SEQ ID NO: 575; a light chain comprising SEQ ID NO: 419 and a heavy chain comprising SEQ ID NO: 576; a light chain comprising SEQ ID NO: 420 and a heavy chain comprising SEQ ID NO: 577; a light chain comprising SEQ ID NO: 421 and a heavy chain comprising SEQ ID NO: 578; a light chain comprising SEQ ID NO: 422 and a heavy chain comprising SEQ ID NO: 579; a light chain comprising SEQ ID NO: 423 and a heavy chain comprising SEQ ID NO: 580; a light chain comprising SEQ ID NO: 424 and a heavy chain comprising SEQ ID NO: 581; a light chain comprising SEQ ID NO: 425 and a heavy chain comprising SEQ ID NO: 582; a light chain comprising SEQ ID NO: 426 and a heavy chain comprising SEQ ID NO: 583; a light chain comprising SEQ ID NO: 427 and a heavy chain comprising SEQ ID NO: 584; a light chain comprising SEQ ID NO: 428 and a heavy chain comprising SEQ ID NO: 585; a light chain comprising SEQ ID NO: 429 and a heavy chain comprising SEQ ID NO: 586; a light chain comprising SEQ ID NO: 430 and a heavy chain comprising SEQ ID NO: 587; a light chain comprising SEQ ID NO: 431 and a heavy chain comprising SEQ ID NO: 588; a light chain comprising SEQ ID NO: 432 and a heavy chain comprising SEQ ID NO: 589; a light chain comprising SEQ ID NO: 433 and a heavy chain comprising SEQ ID NO: 590; a light chain comprising SEQ ID NO: 434 and a heavy chain comprising SEQ ID NO: 591; a light chain comprising SEQ ID NO: 435 and a heavy chain comprising SEQ ID NO: 592; a light chain comprising SEQ ID NO: 436 and a heavy chain comprising SEQ ID NO: 593; a light chain comprising SEQ ID NO: 437 and a heavy chain comprising SEQ ID NO: 594; a light chain comprising SEQ ID NO: 438 and a heavy chain comprising SEQ ID NO: 595; a light chain comprising SEQ ID NO: 439 and a heavy chain comprising SEQ ID NO: 596; a light chain comprising SEQ ID NO: 440 and a heavy chain comprising SEQ ID NO: 597; a light chain comprising SEQ ID NO: 441 and a heavy chain comprising SEQ ID NO: 598; a light chain comprising SEQ ID NO: 442 and a heavy chain comprising SEQ ID NO: 599; a light chain comprising SEQ ID NO: 443 and a heavy chain comprising SEQ ID NO: 600; a light chain comprising SEQ ID NO: 444 and a heavy chain comprising SEQ ID NO: 601; a light chain comprising SEQ ID NO: 445 and a heavy chain comprising SEQ ID NO: 602; a light chain comprising SEQ ID NO: 446 and a heavy chain comprising SEQ ID NO: 603; a light chain comprising SEQ ID NO: 447 and a heavy chain comprising SEQ ID NO: 604; a light chain comprising SEQ ID NO: 448 and a heavy chain comprising SEQ ID NO: 605; a light chain comprising SEQ ID NO: 449 and a heavy chain comprising SEQ ID NO: 606; a light chain comprising SEQ ID NO: 450 and a heavy chain comprising SEQ ID NO: 607; a light chain comprising SEQ ID NO: 451 and a heavy chain comprising SEQ ID NO: 608; a light chain comprising SEQ ID NO: 452 and a heavy chain comprising SEQ ID NO: 609; a light chain comprising SEQ ID NO: 453 and a heavy chain comprising SEQ ID NO: 610; a light chain comprising SEQ ID NO: 454 and a heavy chain comprising SEQ ID NO: 611; a light chain comprising SEQ ID NO: 455 and a heavy chain comprising SEQ ID NO: 612; a light chain comprising SEQ ID NO: 456 and a heavy chain comprising SEQ ID NO: 613; a light chain comprising SEQ ID NO: 457 and a heavy chain comprising SEQ ID NO: 614; a light chain comprising SEQ ID NO: 458 and a heavy chain comprising SEQ ID NO: 615; a light chain comprising SEQ ID NO: 459 and a heavy chain comprising SEQ ID NO: 616; a light chain comprising SEQ ID NO: 460 and a heavy chain comprising SEQ ID NO: 617; a light chain comprising SEQ ID NO: 461 and a heavy chain comprising SEQ ID NO: 618; a light chain comprising SEQ ID NO: 462 and a heavy chain comprising SEQ ID NO: 619; a light chain comprising SEQ ID NO: 463 and a heavy chain comprising SEQ ID NO: 620; a light chain comprising SEQ ID NO: 464 and a heavy chain comprising SEQ ID NO: 621; a light chain comprising SEQ ID NO: 465 and a heavy chain comprising SEQ ID NO: 622; a light chain comprising SEQ ID NO: 466 and a heavy chain comprising SEQ ID NO: 623; a light chain comprising SEQ ID NO: 467 and a heavy chain comprising SEQ ID NO: 624; a light chain comprising SEQ ID NO: 468 and a heavy chain comprising SEQ ID NO: 625; a light chain comprising SEQ ID NO: 469 and a heavy chain comprising SEQ ID NO: 626; a light chain comprising SEQ ID NO: 470 and a heavy chain comprising SEQ ID NO: 627; and a light chain comprising SEQ ID NO: 471 and a heavy chain comprising SEQ ID NO: 628.

16. The composition of claim 1, wherein the GLP-1 receptor agonist is selected from the group consisting of GLP-1(7-37) (SEQ ID NO: 3184);
Exendin-4 (SEQ ID NO: 3163);
Exendin-3 (SEQ ID NO: 3164);
Leu¹⁴-exendin-4 (SEQ ID NO: 3165);
Leu¹⁴,Phe²⁵-exendin-4 (SEQ ID NO: 3166);
Leu¹⁴,Ala¹⁹,Phe²⁵-exendin-4 (SEQ ID NO: 3167);
exendin-4(1-30) (SEQ ID NO: 3168);
Leu¹⁴-exendin-4(1-30) (SEQ ID NO: 3169);
Leu¹⁴,Phe²⁵-exendin-4(1-30) (SEQ ID NO: 3170);
Leu¹⁴,Ala¹⁹,Phe²⁵-exendin-4(1-30) (SEQ ID NO: 3171);
exendin-4(1-28) (SEQ ID NO: 3172);
Leu¹⁴-exendin-4(1-28) (SEQ ID NO: 3173);
Leu¹⁴,Phe²⁵-exendin-4(1-28) (SEQ ID NO: 3174);
Leu¹⁴,Ala¹⁹,Phe²⁵-exendin-4 (1-28) (SEQ ID NO: 3175);
Leu¹⁴,Lys^{17,20},Ala¹⁹Glu²¹,Phe²⁵,Gln²⁸-exendin-4 (SEQ ID NO: 3176);
Leu¹⁴,Lys^{17,20},Ala¹⁹,Glu²¹,Gln²⁸-exendin-4 (SEQ ID NO: 3177);
Phe⁴,Leu¹⁴,Gln²⁸,Lys³³,Glu³⁴, Ile^{35,36}Ser³⁷-exendin-4(1-37) (SEQ ID NO: 3180);
Phe⁴,Leu¹⁴,Lys^{17,20},Ala¹⁹,Glu²¹, Gln²⁸-exendin-4 (SEQ ID NO: 3181);
Val¹¹,Ile¹³,Leu¹⁴,Ala¹⁶,Lys²¹,Phe²⁵-exendin-4 (SEQ ID NO: 3182);
exendin-4-Lys⁴⁰ (SEQ ID NO: 3183);
GLP-1(7-37) (SEQ ID NO: 3184);
HXaa₈EGTFTSDVSSYLEXaa₂₂Xaa₂₃AAKEFIXaa₃₀WLXaa₃₃Xaa₃₄G Xaa₃₆Xaa₃₇; wherein Xaa₈ is A, V, or G; Xaa₂₂ is G, K, or E; Xaa₂₃ is Q or K; Xaa₃₀ is A or E; Xaa₃₃ is V or K; Xaa₃₄ is K, N, or R; Xaa₃₆ is R or G; and Xaa₃₇ is G, H, P, or absent (SEQ ID NO: 3187);
(SEQ ID NO: 3188)
Arg³⁴-GLP-1(7-37);
(SEQ ID NO: 3189)
Glu³⁰-GLP-1(7-37);
(SEQ ID NO: 3190)
Lys²²-GLP-1(7-37);
(SEQ ID NO: 3191)
Gly^{8,36}, Glu²²-GLP-1(7-37);
(SEQ ID NO: 3192)
Val⁸, Glu²², Gly³⁶-GLP-1(7-37);
(SEQ ID NO: 3193)
Gly^{8,36}, Glu²², Lys³³, Asn³⁴-GLP-1(7-37);
(SEQ ID NO: 3194)
Val⁸, Glu²², Lys³³, Asn³⁴, Gly³⁶-GLP-1(7-37);
(SEQ ID NO: 3195)
Gly^{3,36}, Glu²², Pro³⁷-GLP-1(7-37);
(SEQ ID NO: 3196)
Val⁸, Glu²², Gly³⁶, Pro³⁷-GLP-1(7-37);
(SEQ ID NO: 3197)
Gly^{8,36}, Glu²², Lys³³, Asn³⁴, Pro³⁷-GLP-1(7-37);
(SEQ ID NO: 3198)
Val⁸, Glu²², Lys³³, Asn³⁴, Gly³⁶, Pro³⁷-GLP-1(7-37);
(SEQ ID NO: 3199)
Gly^{8,36}, Glu²²-GLP-1(7-36);
(SEQ ID NO: 3200)
Val⁸, Glu²², Gly³⁶-GLP-1(7-36);
(SEQ ID NO: 3201)
Val⁸, Glu²², Asn³⁴, Gly³⁶-GLP-1(7-36);
(SEQ ID NO: 3202)
Gly^{8,36}, Glu²², Asn34-GLP-1(7-36);
(SEQ ID NO: 3206)
GLP-1 analog;
(SEQ ID NO: 3207)
GLP-1 analog;
(SEQ ID NO: 3201)
[Gly^{8,36}, Glu²²]GLP-1(7-37);
(SEQ ID NO: 3202)
HAEGTFTSDVSSYLEGQAAKEFIAWLVKGRG;
(SEQ ID NO: 3203)
AEGTFTSDVSSYLEGQAAKEFIAWLVKGRG;
(SEQ ID NO: 3204)
EGTFTSDVSSYLEGQAAKEFIAWLVKGRG;
(SEQ ID NO: 3205)
HGEGTFTSDVSSYLEGQAAKEFIAWLVKGRG;
(SEQ ID NO: 3206)
HGEGTFTSDVSSYLEGQAAKEFIAWLVKGR;
(SEQ ID NO: 3207)
HLEGTFTSDVSSYLEGQAAKEFIAWLVKGRG;
(SEQ ID NO: 3208)
HGEGTFTSDLSKQMEEEAVRLF;
(SEQ ID NO: 3209)
HGEGTFTSDLSKQMEEEAVRLFI;
(SEQ ID NO: 3210)
HGEGTFTSDVSSYLEGQAAKEFIAWLVKGGG;
(SEQ ID NO: 3211)
HGEGTFTSDLSKQMEEEAVRLAAQAAQQGGG;
(SEQ ID NO: 3212)
HSEGTFTSDVSSYLEEQAAKEFIAWLVKGGG;
(SEQ ID NO: 3213)
HSQGTFTSDVSSYLEEQAAKEFIAWLVKGGG;
(SEQ ID NO: 3214)
HGDGTFTSDVSSYLEEQAAKEFIAWLVKGGG;
(SEQ ID NO: 3215)
HSDGTFTSDVSSYLEEQAAKEFIAWLVKGGG;
(SEQ ID NO: 3216)
HSEGTFTSDVSSYLEEQAAKEFIEWLVKGGG;
(SEQ ID NO: 3217)
HSQGTFTSDVSSYLEEQAAKEFIEWLVKGGG;
(SEQ ID NO: 3218)
HGDGTFTSDVSSYLEEQAAKEFIEWLVKGGG;
(SEQ ID NO: 3219)
HSDGTFTSDVSSYLEEQAAKEFIEWLVKGGG;
(SEQ ID NO: 3220)
HGEGTFTSDVSSYLEEQAAKEFIAWLKNGGG;
(SEQ ID NO: 3221)
HSEGTFTSDVSSYLEEQAAKEFIAWLKNGGG;
(SEQ ID NO: 3222)
HSQGTFTSDVSSYLEEQAAKEFIAWLKNGGG;
(SEQ ID NO: 3223)
HGDGTFTSDVSSYLEEQAAKEFIAWLKNGGG;
(SEQ ID NO: 3224)
HSDGTFTSDVSSYLEEQAAKEFIAWLKNGGG;
(SEQ ID NO: 3225)
HSEGTFTSDVSSYLEEQAAKEFIEWLKNGGG;
(SEQ ID NO: 3226)
HSQGTFTSDVSSYLEEQAAKEFIEWLKNGGG;
(SEQ ID NO: 3227)
HGDGTFTSDVSSYLEEQAAKEFIEWLKNGGG;
(SEQ ID NO: 3228)
HSDGTFTSDVSSYLEEQAAKEFIEWLKNGGG;
(SEQ ID NO: 3229)
HGEGTFTSDVSSYLEEQAAKEFIEWLKNEGG;
(SEQ ID NO: 3230)
HSEGTFTSDVSSYLEEQAAKEFIEWLKNEGG;
(SEQ ID NO: 3231)
HGEGTFTSDVSSYLEEQAAKEFIEWLKNPGG;
(SEQ ID NO: 3232)
HSEGTFTSDVSSYLEEQAAKEFIEWLKNPGG;
(SEQ ID NO: 3233)
HGEGTFTSDVSSYLEEQAAKEFIEWLKNQGG;
(SEQ ID NO: 3234)
HSEGTFTSDVSSYLEEQAAKEFIEWLKNQGG;
(SEQ ID NO: 3235)
HGEGTFTSDVSSYLEEQAAKEFIEWLKNTGG;
(SEQ ID NO: 3236)
HSEGTFTSDVSSYLEEQAAKEFIEWLKNTGG;
(SEQ ID NO: 3237)
HGEGTFTSDVSSYLEEQAAKEFIEWLKNVGG;
(SEQ ID NO: 3238)
HSEGTFTSDVSSYLEEQAAKEFIEWLKNVGG;
(SEQ ID NO: 3239)
HGEGTFTSDVSSYLEEQAAKEFIEWLKQGGG;
(SEQ ID NO: 3240)
HSEGTFTSDVSSYLEEQAAKEFIEWLKQGGG;
(SEQ ID NO: 3241)
HGEGTFTSDVSSYLEEQAAKEFIAWLVKGGG;
(SEQ ID NO: 3242)
HGEGTFTSDVSXYLEEQAAKEFIAWLVKGGG;
(SEQ ID NO: 3243)
HVEGTFTSDVSSYLEGQAAKEFIAWLVKGGG;
(SEQ ID NO: 3244)
HSEGTFTSDVSSYLEGQAAKEFIAWLVKGGG;
(SEQ ID NO: 3245)
HGQGTFTSDVSSYLEGQAAKEFIAWLVKGGG;
(SEQ ID NO: 3246)
HVQGTFTSDVSSYLEGQAAKEFIAWLVKGGG;
(SEQ ID NO: 3247)
HSQGTFTSDVSSYLEGQAAKEFIAWLVKGGG;
(SEQ ID NO: 3248)
HVDGTFTSDVSSYLEGQAAKEFIAWLVKGGG;
(SEQ ID NO: 3249)
HGHGTFTSDVSSYLEGQAAKEFIAWLVKGGG;
(SEQ ID NO: 3250)
HVHGTFTSDVSSYLEGQAAKEFIAWLVKGGG;
(SEQ ID NO: 3251)
HSHGTFTSDVSSYLEGQAAKEFIAWLVKGGG;
(SEQ ID NO: 3252)
HGDGTFTSDVSSYLEGQAAKEFIAWLVKGGG;
(SEQ ID NO: 3253)
HSDGTFTSDVSSYLEGQAAKEFIAWLVKGGG;
(SEQ ID NO: 3254)
HGEGTFTSDVSSYLEEQAAKEFIEWLKNGGG;
(SEQ ID NO: 3255)
HGEGTFTSDVSSYLEEQAAKEFIEWLVKGGG;
(SEQ ID NO: 3256)
HGEGTFTSDYSSYLEEQAAKEFIEWLKNGGG;
(SEQ ID NO: 3257)
HGEGTFTSEVSSYLEGQAAKEFIEWLKNGGG;
(SEQ ID NO: 3258)
HSEGTFTSDLSKQMEEEAVRLFAAQAAQQGGG;
(SEQ ID NO: 3259)
HSQGTFTSDLSKQMEEEAVRLFAAQAAQQGGG;
(SEQ ID NO: 3260)
HGDGTFTSDLSKQMEEEAVRLFAAQAAQQGGG;
(SEQ ID NO: 3261)
HSDGTFTSDLSKQMEEEAVRLFAAQAAQQGGG;
(SEQ ID NO: 3262)
HGEGTFTSDLSKQMEEEAVRLFAAQAAQQGGG;
(SEQ ID NO: 3263)
HGEGTFTSDLSKQMEEEAVRLFIEWLKNGG;
(SEQ ID NO: 3264)
HGEGTFTSDVSSYLEGEAVRLFIEWLKNGG;
(SEQ ID NO: 3265)
HGEGTFTSDLSKQMEEEAVRLFIEWLKNGGPSSGAPPPS;
(SEQ ID NO: 3266)
HGEGTFTSDVSSYLEGEAVRLFIEWLKNGGPSSGAPPPS;
(SEQ ID NO: 3267)
HHGEGTFTSDVSSYLEEQAAKEFIEWLKNGGG;
(SEQ ID NO: 3268)
HHGEGTFTSDVSSYLEEQAAKEFIEWLKDGGG;
(SEQ ID NO: 3269)
HHGEGTFTSDVSSYLEEQAAKEFIEWLKQGGG;
(SEQ ID NO: 3270)
HHGEGTFTSDVSSYLEEQAAKEFIEWLKNQGG;
(SEQ ID NO: 3271)
HHGEGTFTSDVSSYLEEQAAKEFIEWLKNTGG;
(SEQ ID NO: 3272)
HHGEGTFTSDVSSYLEEQAAKEFIEWLKNVGG;
(SEQ ID NO: 3273)
HHGEGTFTSDVSSYLEEQAAKEFIEWLKNPGG;
(SEQ ID NO: 3274)
HHGEGTFTSDVSSYLEEQAAKEFIEWLKNEGG;
(SEQ ID NO: 3275)
HGAGTFTSDVSSYLEGQAAKEFIAWLVKG;
(SEQ ID NO: 3276)
HGDGTFTSDVSSYLEGQAAKEFIAWLVKG;
(SEQ ID NO: 3277)
HGLGTFTSDVSSYLEGQAAKEFIAWLVKG;
(SEQ ID NO: 3278)
HGVGTFTSDVSSYLEGQAAKEFIAWLVKG;
(SEQ ID NO: 3279)
HGFGTFTSDVSSYLEGQAAKEFIAWLVKG;
(SEQ ID NO: 3280)
HGYGTFTSDVSSYLEGQAAKEFIAWLVKG;
(SEQ ID NO: 3281)
HGTGTFTSDVSSYLEGQAAKEFIAWLVKG;
(SEQ ID NO: 3282)
HGNGTFTSDVSSYLEGQAAKEFIAWLVKG;
(SEQ ID NO: 3283)
HGHGTFTSDVSSYLEGQAAKEFIAWLVKG;
(SEQ ID NO: 3284)
HGKGTFTSDVSSYLEGQAAKEFIAWLVKG;
(SEQ ID NO: 3285)
HGIGTFTSDVSSYLEGQAAKEFIAWLVKG;
(SEQ ID NO: 3286)
HGWGTFTSDVSSYLEGQAAKEFIAWLVKG;
(SEQ ID NO: 3287)
HGPGTFTSDVSSYLEGQAAKEFIAWLVKG;
(SEQ ID NO: 3288)
HGSGTFTSDVSSYLEGQAAKEFIAWLVKG;
(SEQ ID NO: 3289)
HGRGTFTSDVSSYLEGQAAKEFIAWLVKG;
(SEQ ID NO: 3290)
AHGEGTFTSDVSSYLEGQAAKEFIAWLVKG;
(SEQ ID NO: 3291)
GHGEGTFTSDVSSYLEGQAAKEFIAWLVKG;
(SEQ ID NO: 3292)
HHGEGTFTSDVSSYLEGQAAKEFIAWLVKG;
(SEQ ID NO: 3293)
HHEGTFTSDVSSYLEGQAAKEFIAWLVKG;
(SEQ ID NO: 3294)
HGEATFTSDVSSYLEGQAAKEFIAWLVKG;
(SEQ ID NO: 3295)
HGESTFTSDVSSYLEGQAAKEFIAWLVKG;
(SEQ ID NO: 3296)
HGEVTFTSDVSSYLEGQAAKEFIAWLVKG;
(SEQ ID NO: 3297)
HGEKTFTSDVSSYLEGQAAKEFIAWLVKG;
(SEQ ID NO: 3298)
HGEETFTSDVSSYLEGQAAKEFIAWLVKG;
(SEQ ID NO: 3299)
HGEGTFTSDVSSYLEGQAAKEFIAWLVKG;
(SEQ ID NO: 3300)
HVEGTFTSDVSSYLEGQAAKEFIAWLVKGRG;
(SEQ ID NO: 3301)
HSEGTFTSDVSSYLEGQAAKEFIAWLVKGRG;
and
(SEQ ID NO: 3302)
HGQGTFTSDVSSYLEGQAAKEFIAWLVKGRG.

17. The composition of claim 1, wherein the composition further comprises a linker peptide in between the C-terminus of the GLP-1 receptor agonist and the N-terminus of the light chain variable region or heavy chain variable region.

18. The composition of claim 17, wherein the linker peptide is selected from the group consisting of (Gly₃Ser)₂ (SEQ ID NO: 3303), (Gly₄Ser)₂ (SEQ ID NO: 3304), (Gly₃Ser)₃ (SEQ ID NO: 3305), (Gly₄Ser)₃ (SEQ ID NO: 3306), (Gly₃Ser)₄ (SEQ ID NO: 3307), (Gly₄Ser)₄ (SEQ ID NO: 3308), (Gly₃Ser)₅ (SEQ ID NO: 3309), (Gly₄Ser)₅ (SEQ ID NO: 3310), (Gly₃Ser)₆ (SEQ ID NO: 3311), (Gly₄Ser)₆, GGEGGG (SEQ ID NO:3312); GGEEEGGG (SEQ ID NO:3313); GEEEG (SEQ ID NO:3314); GEEE (SEQ ID NO:3315); GGDGGG (SEQ ID NO:3316); GGDDDGG (SEQ ID NO:3317); GDDDG (SEQ ID NO:3318); GDDD (SEQ ID NO:3319); GGGGSDDSDEGSDGEDGGGGS (SEQ ID NO:3320); WEWEW (SEQ ID NO:3321); FEFEF (SEQ ID NO:3322); EEEWWW (SEQ ID NO:3323); EEEFFF (SEQ ID NO:3324); WWEEEWW (SEQ ID NO:3325); FFEEEFF (SEQ ID NO:3326). GGGG (SEQ ID NO: 3327); GGGGSGGGG (SEQ ID NO: 3328); GAPAPAPAPG (SEQ ID NO: 3329); GGGGAGGGGAGGGG (SEQ ID NO: 3330); GAPAPAPAPAPAPG (SEQ ID NO: 3331); GAPAPAPAPAPAPAPAPG (SEQ ID NO: 3332); GGGGAGGGGAGGGGAGGGG (SEQ ID NO: 3333); GAPAPAPAPAPAPAPAPAPAPG (SEQ ID NO: 3334); GSGSATGGSGSVASSGSGSATGS (SEQ ID NO: 3335); and GSGSATGGSGSVASSGSGSATHL (SEQ ID NO: 3336).
